United States Patent Application Publication US 2026/0258465 A1, published September 3, 2026 (application 19/672,231).

The application's sequence listing, which the Patent Office published only in electronic form, follows.

SEQUENCE LISTING (3469 sequences)

SEQ ID NO: 1 - protein, 427 aa, Vibrio cholerae
MSSNKPLWYRSRGYLHFDLPVSINKAKNLVTNPDLVSKHAFFPLISYTVESKKISKNKDTRKIDVAVKQRPIAYSSHMDSHIYAFYANLLSKKYEAKLKSAGLTESILAFRGLGKSNIDFAFEAFEQIKTMGECSAVALDFSKFFDTLDHDLLKQSWANLLGEKKLPSDHFNVFKSITKFSQVNKEELYKEFGISPNNPKNGRNRVCTAQEFRDVVRNKKLIKTNKGSFGIPQGSPISALLSNIYMFEFDAEMKRYMDIHGGKYYRYCDDMLFIVPAPLRDKVAGYAQEQVKNLKVSINPKKTELRTFSSQGGILVADQMLQYLGFMFDGENVYIRSSSLARYSEKMKRGIRLAKKTMDKYNAVRVAKGLPEKSLYKRKLYSRYTHLGGRNFVTYGLRAASAMQSKTIKRQLKPLWRRFHEELEKET

SEQ ID NO: 2 - protein, 424 aa, Escherichia coli
MNNDYPWFRKRGYLHFDEPVSLKKAVKYVSSPEKIIKHSFLPFLSFEVKSFKIKKDKSTKQLSKTEKLRPIAYSSHLDSHIYAFYAEYLTGHYELLIQKNNLHENILAFRSLNKSNIEFAKRAFDTITEMGECSAVALDLSGFFDNLDHQILKHQWCKVIGTEALPQDHFAIYKSITRYSKVDKNRAYEILGISKNNPKYNRRKICTPVDFRNKIRKNGLIIVNKAQKGIPQGSPISALLSNIYMLDFDIEMRDYAQELGGHYYRYCDDMLFIVPTKYNKTLAGDVAQRIKNLKVELNTKKTEIRDFIYKDSTLVANMPLQYLGFIFDGNNIFLRSSSLARYSERMKRGVRLAKATMDSKNRIRQIKGEALKALFKKKLYARYSHIGRRNFLTYGYRAAKIMNSRTIKRQLKPLQKRLENEILK

SEQ ID NO: 3 - protein, 425 aa, Klebsiella pneumoniae
MNNDDYPWFRKRGYLHFDEPVSLKKAVKYVSSPEKIIKHSFLPFLSFEVKSFKIKKDKSTKQLSKTEKLRPIAYSSHLDSHIYAFYAEYLTGHYELLIQENNLHENILAFRSLNKSNIEFAKRAFDTITEMGECSAVALDLSGFFDNLDHQILKHQWCKVIGTEALPQDHFAIYKSITRYSKVDKNRAYEILGISKNNPKYNRRKICTPVDFRNKIRKNGLIIVNNSQKGIPQGSPISALLSNIYMLDFDIEMRDYAQERGGHYYRYCDDMLFIVPTKYNKTLAGDVAQRIKHLKVELNTKKTEIRDFIYKDSTLVANMPLQYLGFIFDGSNILLRSSSLARYSERMKRGVRLAKATMDSKNRIRENKGEALKALFKKKLYARYSHIGRRNFLTYGYRAAKIMNSKAIKRQLKPLQKRLENEILK

SEQ ID NO: 4 - protein, 428 aa, Yersinia ruckeri
MESREHPWYRRRGYLHFDKPISLEHALDIVSNPDLIATHSFLPFITFTSASYKIKQDKSTSAINKILKERPIAYSSHVDSHIYSYYAAILSELYENELRAHNVSKNVLAFRTLNKSNINFAYEAFQEIKIRGNCSAVALDLSKFFDTIDHGFLKDAWCKLLATDKLPEDHYAVFKAITKYSKVDKSTIYDLMGIPKNNAKYTKKTRKQICTFVEFRDKVRKGKLIVSNKAGFGIPQGSPISALLSNIYMLNFDIEMDEYVSSLGGVYFRYCDDMLFIVPTDEKNNIAGEAEKRLIKLKVSLNIKKTEIREFSVSPTKIRCDKPLQYLGFLFDGENIFLRSSSLSRYSDRMKSGVRLAKATMKRKNKIRKLKGLSKKELFKEKIYARYAHVGKRNFLTYGYRASRIMNSNSIRKQLKPLWERLQKEISK

SEQ ID NO: 5 - protein, 436 aa, Vibrio crassostreae
MKNTSEHPWFTKRNYLHFDIPVSVHKAERIASEPITVARHAFFPFISYSFQLTKLDRDTSTGKLYRKPKPRGVAYSSHVDSHIYAFYASQLSTLYEKQIEKLGLHESVLAFRKLDGKSNIHFADDAFKHISKFEDCSVIALDFSKFFDTLDHQILKEEWRKLLGEDCLPKDHYNVFRSLTKFSTVDKCALFDLFDISQYNPKANGRNRVCSPSEFRQKVRGSGLIEQNPNGMMGIPQGSPISALLSNIYMLNFDAQMKSYVDSVDGKYFRYCDDMLFIVPSEHRDMIEKLANSKVTALKVKINSDKTEIRDFRIHDGKLSSFDEHGKQKPLQYLGFLFDGHSIFLRSTALARYSEKMKGGVKLAKKTMEKENRIRRDKGEPEQTYLYKRKLHKLYTARGQRNFLSYGYRAAKIMNSKSIRKQLKPLWQRFQDEVSK

SEQ ID NO: 6 - protein, 424 aa, Alloalcanivorax xenomutans
MAKESPSWFQRRTYLHFDRPVGAKKAERVVSDPVEVARHSFFPFLTYNITSHKARKTEAGNMEMVAKERPIHYAAHMDSHIYSYYAEILSELYEKKLSELGISSSVLAFRKLGKSNIEFAKDAFDIIKMKAPCVAVGYDVSKFFQKIDHAKLKATWVGLLDEEILPKDHHAVFRSLTKYAEMDRGKVYEILGLPKYNKKSIGPRICSPSQFRETVRPSKEMYVNDRSVGIPQGSPISALLSNIYMINFDCAIAEVAKEAGAYYCRYCDDILVVCDTENVVDFEDLIRRELGKLKLDINEQKTDKARYRVSKGKVYCDRPIQYLGFLFDGESVFLRSASLARYSERMRRGVHLAKKTKRKYNKMRVKRGEPIRRLYKKKLYARYSHLGRRNFVRYGLRAADIMESKEIRQQLKPLWRRLKEEMER

SEQ ID NO: 7 - protein, 458 aa, Collimonas arenae
MVEKYYLVNPGERSIDCRHLRSPGLLVHPEKVRLFKKKHPWFRRRGYRHFDNPIGFATARKIVTSPHRVETHSFYPLIDFNATSIKVKREASTNQLKKIPKIRPICYAAHIDSHIYSYYAYMLAKRYEQAVHENGLDTCVIAFRSLKKSNIEFAADVFDEIKRRDNCHVICLDIKGFFDNLDHETLKNSWANILGQEKLPGDHYAVFRSLTNHAKVGKTELYALLDISIHNPGGNSKRLCSVEDFREKVRKAKIIKRQTGTKGIPQGSPISALLSNIYMLAFDIVINSYVQKCGGRYFRYCDDMLLIVPAEEKNQALNLAEAEIKKLLLIIQSEKTEQRDFAVVAGKLQSSKPLQYLGFLFDGQRILLRSASLARYSDRMRRGIRLAKATMKKKNEVRTANGDAAKALFKRKIYKRYTCVGRRNFITYGYRAAQMMQSKSIKKQLRCLWLRVQKEILK

SEQ ID NO: 8 - protein, 423 aa, Burkholderia cepacian
MSEPVEWFKRRRYLHFDLPTSEPAAVAIAGNPSIVARHAFYPFIQFTVKSRKVKWDKLTKRLVTTEKERPVSYASHVDSHIYACYASILSQRYEDYLKEVGYQSSVLAFRKLGKSNIEFAKDAFDAIKEMGGADVIAADISDFFGSLNHKILKASWAKILKVNELPNDHYNVFKSLTRFTWVDKTNLYKALGISIYNPRGSGARICTPEIFRSVVRKLGLIQRNAADKGIPQGSPISALLSNIYMTDFDQALWTSIASMGGKYFRYCDDMLIIAPEGKGKEFMRLARELADLYALPLHPKKTEERFFTSSSGKLLADKPLQYLGFVFDGQQVSLRSASLARYSDRMRRGVRLARVTMHARNTLRVERGESPRPLYKGKLYRRYSYLGRRNFVSYAIRAANILDEKAIKRQVKPLWKRLRSQMK

SEQ ID NO: 9 - protein, 431 aa, Pseudomonas syringae
MDELPWYKPRKYLHFDRPVGQKAALDYVSSPQKVAAHSFYPFITYTSVILKYRLDNDRGVYVKNPKPRPISYSAHLDSHIYAYYCFVLSQLYEKELVRRGLHTSVLAFRSIDGKSNIHFAHDAFCEIKAKGECCVLAFDVEKFFDRLDHSRLKAAWAKLLGVGKLPADHFAVFKSITKSSRVDKVALYDKLGVSIHNPRVEDKRLCSAKRFRDDVRGGGLLTTNPESRGIPQGSPISALLSNIYMLEFDLALISKLSLTESVFHRYCDDILVICDSEKEDEIYEYVNDEIRKLGLNLQEKKTEIRQFAFDAAGKLRSDKPVHYLGFSFDGQREHIRSSSITRYYKKLRKRIWVSKKAMDRCNELRAGRGELPRELFLRTIYRGYSYLGRRNFISYGFRAANIMDSQSIRKQLRSHWKKLNKLLADARSNNQ

SEQ ID NO: 10 - protein, 427 aa, Stutzerimonas stutzeri
MAEAWYKSRGYLHFDRPVNQATATEIVSSPDAVSRHAFYPFIRYVAQTQKVFFDKGLGKVVKKEPKKRPISYAAHVDSHIYSYYCEKLSKAYEDHLGKVPWSSSILAFRSLGKSNIDFARDAFLDISVRDSSCVIAIDIKGFFENLNHAHLKKSWQTLLGTSTLPDDHYAVYRSLTKYSFVNRDQVYEVLGLSKNNPKNGRKRICEPQKFREKVRNGGLIETNKLNKGIPQGSPISAMLSNVYMMGFDEQVHAYVQACGGSYYRYCDDVLLIVPLAKEAEAKDFVNQRVDEIGLEIQEAKTETCKFTRSAKGLRTDRPLQYLGFIFDGANIYLRSSSLARYQDRVNRGIWVAGKCMDKVNAKRISRGQLPRSMFLKKLYKRYSYLGRRNFISYGYRAAKIMDSPSIRKQLKPHWRRLRERISDAQGE

SEQ ID NO: 11 - protein, 427 aa, Vibrio cholerae; identical to SEQ ID NO: 1

SEQ ID NO: 12 - protein, 436 aa, Vibrio splendidus; identical to SEQ ID NO: 5

SEQ ID NO: 13 - protein, 427 aa, Vibrio tasmaniensis
MPLNKPLWYRSRSYLHFDLPVSFNKAKNLVTNPILVSKHAFFPLINYAVESKKISKNKDTRKIDVAVKERPIAYSSHVDSHIYAFYANVLSKKYEAKLKSAGLTESILAFRGLGKSNIDFSFEAFEQIKIMGECSAVALDFSKFFDTLDHDLLKQSWASLLGEKKLPSDHFNVFKSITKFSKVNKVELYKEFGISPNNPKNGRNRVCTAQEFRNVVRKKKLIKTNPDPFGIPQGSPISALLSNIYMLEFDAEMKRYMDIHGGKYYRYCDDMLFIVPAPLRDKVAGYAQEQVKQLKVSINPKKTELRTFSSQGGILVADQMLQYLGFMFDGENVYIRSSSLARYSEKMKRGIRLAKKTMDKYNAVRAAKGLPEKGLYKRKLYSRYTHLGGRNFVTYGLRAASTMQSKTIKRQLKPLWRRFHEELEREA

SEQ ID NO: 14 - protein, 427 aa, Stutzerimonas stutzeri
MPENWYKSRGYLHFDRPINQAAALEIVSSPKTVAKHAFYPFIRYVAQTQKVFFDKNIGKVVKKDPKQRPISYAAHVDSHIYSYYCELLNRAYENHLATVQWSSAILAFRALGKSNIDFARDAFLDIATRDSCCVIAIDIKGFFDNLDHTHLKNAWQALLGSSQLPDDHYAVYRSLTKFSFVYRDQVYEALGLSKNNPKQGRKRICEPHEFRDKVRQGGLIETNKDKKGIPQGSPISAMLSNVYMMGFDEQIHAYVESCSGAYYRYCDDVLLIVPLEKEVEAKALVDQRVNEIGLEIQAAKTETCKFTRSTKGLRSDRPLQYLGFIFDGTNIYLRSSSLARYQDRVHRGIWLAKKCMDKVNAKRISRGQLPRSMFLKKLYKRYSYLGRRNFISYGYRAARIMNAPSIKKQLKPHWNRLRERISDAQGE

SEQ ID NO: 15 - protein, 427 aa, Vibrio metoecus
MSSNKPLWYRSRGYLHFDLPVSINKAKNLVTNPDLVSKHAFFPLISYTVESKKISKNKDTRKIDVAVKERPIAYSSHMDSHIYAFYANLLSKKYEAKLKSAGLTESILAFRGLGKSNIDFAFEAFEQIKTMGECSAVALDFSKFFDTLDHDLLKQSWANLLGEKKLPSDHFNVFKSITKFSQVNKVELYKEFSISPNNPKNGRNRVCTAQEFRDVVRNKKLIKTNKGSFGIPQGSPISALLSNIYMFEFDAEMKRYMDIHGGKYYRYCDDMLFIVPAPLRDKVAGYAQEQVKNLKVSINPKKTELRTFSSQGGILVADQMLQYLGFMFDGENVYIRSSSLARYSEKMKRGIRLAKKTMDKYNAVRVAKGLPEKSLYKRKLYSRYTHLGGRNFVTYGLRAASAMQSKTIKRQLKPLWRRFHEELEKET

SEQ ID NO: 16 - protein, 458 aa, Collimonas arenae; identical to SEQ ID NO: 7

SEQ ID NO: 17 - protein, 427 aa, Vibrio harveyi
MSSNKPLWYRSRGYLHFDLPVSFKKAKNLVTNPDLVSKHAFFPLINYAVESKKISKNKDTRKIDVAVKERPIAYSSHMDSHIYAFYANLLSKKYEAKLKSAGLTESILAFRGLGKSNIDFAFEAFEQIKIMGECSAVALDFSKFFDTLDHDLLKQSWANLLGEKNLPSDHFNVFKSITKFSKVNKVELYKEFGISPNNPKNGRNRVCTAQEFRDVVRKKKLIKTNKDPFGIPQGSPISALLSNIYMFEFDAEMKRYMDIHGGKYYRYCDDMLFIVPAPLRDKVAGYAQEQVKKLKVSINPKKTELRTFSSQGDVLVADQMLQYLGFMFDGENVYIRSSSLARYSEKMKRGIRLAKKTMDKYNAVRAAKGLPEKALYKRKLYSRYTHLGGRNFVTYGLRAASTMQSKTIKRQLKPLWRRFHEELERET

SEQ ID NO: 18 - protein, 427 aa, Pseudomonas sp.
MAEAWYKSRGYLHFDRPVNQATATEIVSSPDAVSRHAFYPFIRYVAQAQKVFFDKGLGKVVKKEPKKRPISYAAHVDSHIYSYYCAQLNQAYEECLKSAPWSPAILAFRSLGKSNIDFARDAFLDIAVRESCCVVAIDIKGFFDNLNHGYLKDAWQDLLGKNKLPDDHYAVYRSLTKYSFVNRDQVYEALGLSKNNPKNGRKRICEPQEFREKVRNGGLIETNKLNKGIPQGSPISAMLSNVYMMGFDEQVHAYVQACGGSYYRYCDDVLLIVPLAKEAEAKDFVNQRVDEIGLEIQEAKTETCKFTRSAKGLRTDRPLQYLGFIFDGANIYLRSSSLARYQDRVNRGIWVAGKCMDKVNAKRISRGQLPRSMFLKKLYKRYSYLGRRNFISYGYRAAKIMDSPSIRKQLKPHWRRLRERISDAQGE

SEQ ID NO: 19 - protein, 473 aa, Aureimonas sp.
MPRDRLKRYPHFDSPLSPEAATALATDPVAVARHPFRPLLLFQDVKRYFRRHGQPRKPPKKRPIRFAARGDAYIYMRYRDWLSCLYEERLGSLDLGDAVAAYRRVRSPYRRGNKCNIDFAYDAIGHIRRLRDCHVLCLDIKSFFESLDHARLKEVWASLLGVGDLPPDHYRVFRSLTNYVEVDQLEVYRRLGFWGWKAVRNRGDLVEGYLVDRRQIPTQLCDARTMREVVFGEGGKHPKIAVRRTESYGIPQGTPISDLLANMYMLDFDRDMKTLATSLGGHYSRYSDDILFVVPADAVAPSVLERTVSDAISLQGDELRIAEAKTSVHRFAPDGDTLSCVAVGSTPPNKRFEYLGFRFDGRNVRLRDSTLSVLRQKIAGTVRQEAVAQSRRYRSRTTDEICDRYDYRRIYERYGRVRDFEDVTDKSGWTFWTYVKRIEEVMGPDARPILRQLRNQKAQIRERFKHYVEKDRA

SEQ ID NO: 20 - protein, 427 aa, Vibrio atlanticus
MSSNIPLWYRNRGYLHFDLPISLKKARNLVTNSDLVAKHAFFPLINYAVESKKISKDKKTRKIDIAVKERPIAYSAHVDSHIYAYYTEILSRKYESRLKQLGLSECILAFRGLGKSNIDFAFEAFEQIKDMGECSAVALDFSKFFDTLDHSILKQSWAGLLSKDKLPPDHFNVFKSITKFAQVNKVDLYNEFGISPNNPKNGRNRICTAKEFRDIVRTKKLIKPNKNSFGIPQGSPISALLSNIYMLEFDAEMKRYVDIHGGKYYRYCDDMLFIVPTPLKVRVAGYAQDRIKSLKVTINPKKTELRTFKYKNGSLTSEQMLQYLGFMFDGENVYIRSSSLARYSEKMKRGIRLAKRTMDKYNSVRITKGLPEKKLYKRKLYSRYTHLGGRNFVTYGLRAAKTMQSKTIKRQLKPLWRRFHEEIEREI

SEQ ID NO: 21 - protein, 446 aa, Albimonas donghaensis
MSWLNLPQSDEEIPDHKTLKFPEAYQTKERNYDHFDLRLSDQQRTAFTKTHEFKEKHRFLPLLGYTNFTRRVRKLDDGTIQAKIKPRNIRYASHSDAAYLEAYSLALNEPYEAYLKSRALSKNVLAYRSTGLTNIDHAKSLFAEIRLRQDCTVVALDISAFFDTLDHKLLRQEILRIKGETELSEVEWSIFKNVTKFSWVEIADLDTILGKLRDRPGRICSPDAFKEHIRNDKTLVRSNEMPFGIPQGLPISGLLANIYMLTLDETISKMVEKCGGSYRRYSDDIAIVIPPNMKAKHISQIVLKVASESHLSISDEKTEICEFRDGIASKDTSHIQYLGFTFDGEKTLLRESTILNYKKKMQRGIRAKMLAARQHGIPASNTHKRELLSRYTHLGKRRNFVKYALRCADEMNAPEIRQQVKRHMTWFKSAWIRESFRATRYVIDKD

SEQ ID NO: 22 - protein, 427 aa, Pseudomonas resinovorans
MPENWYKSRGYLHFDRPINQAAALEIVSSPKTVAKHAFYPFIRYVAQTQKVFFDKSIGKVVKKDPKQRPISYAAHVDSHIYSYYCELLNQAYEDHLAKAKWSSAILAFRALGKSNIDFARDAFLDIAVRDSCCVIAIDIKGFFDNLDHAHLKSAWQTLLGTSQLPDDHFAVYRSLTKYSFVHRDQVYEALALSKNNPKQGRKRICEPHEFRAKVRNGRLIETNKDKKGIPQGSPISAMLSNVYMMGFDEQIHAYVESCGGAYYRYCDDVLLIVPLEQEAAAKALVELRVNAIGLEIQPAKTETCKFTRSAKGLRSDRPLQYLGFIFDGANIYLRSSSLARYQDRVHRGIWLAGKCMEKVNAKRIARGQLPRSMFLKKLYKRYSYLGRRNFISYGYRAAKIMNAPSIRKQLKPHWNRLRDRISDAQGE

SEQ ID NO: 23 - protein, 427 aa, Stutzerimonas stutzeri; identical to SEQ ID NO: 10

SEQ ID NO: 24 - protein, 427 aa, Vibrio sp.
MSAKSPTWYRSRGYLHFDLPISSVKAKRLVTNPELVAKHAFFPLINYSVESKKISKDKASSRIDVTYKERPIAYSSHVDSHIYAYYAELLSVKYESKLKELELSECVLAFRGLGKSNIDFAHEAFEQIKNMGECSAVALDFSKFFDTLDHELLKKSWAAILDTNKLPNDHFNVFKSITKFSKVNKVDLYNEFSISNNNPKKGRNRVCSSKEFRDVVRAKKLIKTNQDSFGIPQGSPISALLSNIYMLEFDAEMNRYVKMYGGKYYRYCDDMLFIVPTGQKKKVAGYAQKKVKGLKVSINPKKTELRTFTKQGNILVADQMLQYLGFMFDGENAYIRSSSLARYSEKMKRGIRLAKKTMVKYNAIRQSKGLDEQPLYKRKLYSRYTHLGGRNFITYGLRAADTMGSKTIKRQLKPLWRRFNEELKKET

SEQ ID NO: 25 - protein, 479 aa, Inquilinus limosus
MAYTWVPSIKHYPHFDKSIRPSDIWKLVRNPDRVAANAFYPFLKYEKRWQPFRGSEFDKAVSGFQKPEKKEREIRYASRRDSYIYSYYRHMLSGYYENALAANGLSKNVIAYRRVKSSAGRGKSNVEFAYDAFIEIRKLGNCGVVALDISKFFESIDHGILKKQWCSLLGVADLPKDHAAVFRSITSYAVVDRAAAYERLGYVERKIVKGNERLVYTKKFRETPRQLCSNGDFRVKICGQGGAFSKLVRKNEKEYGIPQGSPISDMLANLYLIEFDRAVNQFVINIGGTYYRYSDDILIIVPGGVAEANCARDFAMNEIKKHGDNLLIKDSKTSLLVYKQDGKNQIFERIDGKGRNDLEYLGFRYDGKKIRIRDATISGLYRKISSAAKVVARKQVKRYKNKDLKYLLEKFDHSAFMKRYGRVLDFEVESDYRDWTFWTYAKRSIDTFGALGSPISNQLRNYKRICRSRVESEITKMHK

SEQ ID NO: 26 - protein, 430 aa, Bacillus thuringiensis
MNKKKYGIKRYKHFDKKKSIEKVKDKIQDPQWVAKHGFYPFIHFEIKFQKYSRKEKQAKEKVRKIFYASHIDSYIYKYYGDRLNNNYNCIVDELGISDVATAYRNNLSGKSNIDFAKEVIDFIKSQKAAYIFVADFTNFFDTLDHKYLKDKIRHVLKADTLPNDYYNVFKNITRFSYFFKDAIEMDLETKYTESEIKSSYKYFTEEEFRNFKHKNIYRNTKGYGIPQGAGISSVCSNIYLLDFDEKIQNYVNEQNGIYRRYCDDLIIVIPIEGGFKDYDYKIPQTMVENIKIQIPNLEIQPEKTGNYFYINNKIIDLEFKNTKLDYLGFSFNGEEVRIREKSLFKYYTRMYRKIRICNRKSKEFGRKSYRKALYRNYSHLGKKKKGHGNFLSYASRAQAIFDEESSTLNLMEAQVKKHWKNINARLKDPE

SEQ ID NO: 27 - protein, 430 aa, Bacillus anthracis
MDKKKYGIKRYKHLDKKKSIEKVKDKIQDPQWVAKHGFYPFIHFEIKFQKYSRKEKQAKEKVRKIFYASHIDSYIYKYYGDELNNHYNCIADELGISDIATAYRNNLSGKSNINFSKEVIDFIKSQKAAYIFVADFTNFFDTLDHKYLKNKIRQVLKVDTLPDDYYNVFKNITRFSYFFKDAIEMDLETKYTESEIKGSYKYFTEEEFRDFKHKNIYRNTKGYGIPQGAGISSVCSNIYLLDFDKEIQNYINEQNGIYRRYCDDLIIVIPIEGEFKDYDYTIPKKIVENIKMKIPNLEIQPEKTGNYFYTNDKIIDLEFKNTKLDYLGFSFNGEEVRIREKSLFKYYTRMYRKIRICNRKSKEFGRKSYRKALYRNYSHLGKKKKGHGNFLSYASRAQEIFDKESGTVNLMETQVKKHWKNINARLEDPE

SEQ ID NO: 28 - protein, 480 aa, Parvibaculum sp.
MTDWKLKPSDLKKYPHFDAPISAAAAEAYVKDPAKVVAHPFYPFIRYIQNWNKFAKKGALGKSKERPIRYGARLDAYIFSYYRYLLAQRYESLLKRYNLAGNILAYRRILGADGRGKCNIHFAKDAFDFIESLGDCYVICLDISSYFESLDHLMLKKVWAGLLKEEKLPADHFAVFKAITNYAYVDKQEAYERLGYFGNKRKAKSGKDISGYLTAYTDMPTQLCSAAKFRSEIAGGGGKKSIIQKNDDAYGIPQGAPLSDLLANMYLLHFDREVRTWMRKRGGVYFRYSDDILLIGKGGEKEALALLKKIQALIPKYGAKLAIKDSKSSIHVFRQISGRRTCECVFGKGRNGLEYLGFRFDGRNVYLRDSTLANLNRKVVYAARRRANSLATRYANKTADEIWDEFGFDQFVQRFYKVEDFDSVRDDVHSWTFWTYAQRAATIFGSKGRKIKSQLKGFRDFAEEKARGEVEKAVLRRDRK

SEQ ID NO: 29 - protein, 427 aa, Vibrio chagasii
MSSNIPLWYRSRGYLHFDLPISLKKARNLVTNPDLVSKHAFFPLINYAVESKKISKDKKTRKIDIAVKERPIAYSAHVDSHIYAYYANLLSRKYESRLKSAGLSDCILAFRGLGKSNIDFAFEAFEQIKKMGECSAVALDFSKFFDTLDHSLLKQSWANLLGEEKLPPDHFNVFKSITKFSQVNKVDLYKEFGISPNNPKNGRTRVCTAQEFRDVVRKKKLIKPNKNSFGVPQGSPISALLSNIYMFEFDAEMKKYMDIHGGKYYRYCDDMLFIVPAPLRDKVAGFAQERVKSLEVTINTKKTELRTFKYQNDVLVADQMLQYLGFMFDGENAYIRSSSLARYSEKMKCGIRLAKRTMDKYNAVRLTKGLPEKDLYKRKLYSRYTHLGGRNFVTYGLRAAKTMQSKTIKRQLKPLWRRFHEELERET

SEQ ID NO: 30 - protein, 427 aa, Photobacterium leiognathi
MSSNKPLWYRSRGYLHFDLPVSFKKAKSLVSNPNLVSKHAFFPLINYVVESKKISKNKDTRKIDVAVKERPIAYSSHMDSHIYAFYANLLSKKYEAKLKSAGLTESILAFRGLGKSNIDFAFEAFEQIKIMGECSAVALDFSKFFDTLDHDLLKQSWANLLGEKNLPSDHFNVFKSITKFSKVNKVELYKEFGISPNNPKNGRNRVCTAQEFRDVVRKKKLIKTNKDPFGIPQGSPISALLSNIYMFEFDAEMKRYMDIHGGKYYRYCDDMLFIVPAPLRDKVAGYAQEQVKKLKVSINPKKTELRTFSYRDGILVADQMLQYLGFMFDGENVYIRSSSLARYSEKMKRGIRLAKKTMDKYNAVRVAKGLPEKSLYKRKLYSRYTHLGGRNFVTYALQAASTMHSKTIKRQLKPLWHRFHEELEREI

SEQ ID NO: 31 - protein, 427 aa, Photobacterium leiognathi; identical to SEQ ID NO: 30

SEQ ID NO: 32 - protein, 427 aa, Photobacterium damselae
MSSNKPLWYRSRGYLHFDLPVSFKKAKNLVTNPDLVSKHAFFPLINYAVESKKISKNKDTRKIDVAVKERPIAYSSHMDSHIYAFYANLLSKKYEAKLKSAGLTESILAFRGLGKSNIDFAFEAFEQIKIMGECSAVALDFSKFFDTLDHDLLKQSWASLLGEKNLPPDHFNVFKSITKFSKVNKVELYKEFGISPNNPKNGRNRVCTAQEFRDVVRRKKLIKTNKDPFGIPQGSPISALLSNIYMFEFDAKMKRYMDIHGGKYYRYCDDMLFIVPAPLRDKVAGYAQEQVKKLKVSINPKKTELRTFSSQGDILVADQMLQYLGFMFDGENVYIRSSSLARYSEKMKRGIRLAKKTMDKYNAVRAAKGLPEKTLYKRKLYSRYTHLGGRNFVTYGLRAASTMQSKTIKRQLKPLWRRFHEELERET

SEQ ID NO: 33 - protein, 427 aa, Vibrio pectenicida
MSSNKPIWYRSRGYLHFDLPVSFKKAQNLVTNPDLVSKHAFFPLINYAVESKKISKNKETRKIDVAVKERPIAYSSHVDSHIYAFYANLLSKRYEAQLKASDLTDCILAFRGLGKSNIDFAFEAFEQIKAMGECSAVALDFSKFFDTLDHALLKQSWAGLLGEDKLPSDHFNVFKSITKFSQVNKVELYKEFGISPNNPKNGRNRVCTAREFRDVVRKKKLIKTNKGSFGIPQGSPISALLSNIYMIKFDAEMKRYTNIHGGKYYRYCDDMLFIVPAPLRDKVAGYAQEQVKKLKVLINPKKTELRTFSYQNDVLVADQMLQYLGFMFDGENVYIRSSSLARYSEKMKRGIRLAKKTMEKYNVVRAAKGLPERELYKRKLYSRYTHLGGRNFVTYGLRAANKMQSKTIKRQLKPLWRRFRDELERET

SEQ ID NO: 34 - protein, 282 aa, Klebsiella pneumoniae
MNNDDYPWFRKRGYLHFDEPVSLKKAVKYVSSPEKIIKHSFLPFLSFEVKSFKIKKDKSTKQLSKTEKLRPIAYSSHLDSHIYAFYAEYLTGHYELLIQENNLHENILAFRSLNKSNIEFAKRAFDTITEMGECSAVALDLSGFFDNLDHQILKHQWCKVIGTEALPQDHFAIYKSITRYSKVDKNRAYEILGISKNNPKYNRRKICTPVDFRNKIRKNGLIIVNNSQKGIPQGSPISALLSNIYMLDFDIEMRDYAQERGGHYYRYCDDMLFIVPTKGFVE

SEQ ID NO: 35 - protein, 454 aa, Pseudoxanthomonas composti
MGRVSLDGACAVPAGGACGRHSQPRPVDIGGLMRDRGPPGSALEAALQKKRSYKHFDVPLNSKKCEQLVSDPVAVSRHAFFPFLRLDIVRPRIKRLATGKLQKSNKVRDIRYAAHADAAIYAYYNYVLAELYEQKLSIAGLQEEVIAFRPLGKSNVNFAKEAFDWVASNAPCTALGFDVKDFFGSLDHAFLKSAWAELLGKATLPKDHYAVYRSLTRHASVELIAARKALGISRSALEKRERICEAAEFRSAIRGAGLVHVNSSGRGIPQGSPMSALLSNIYMLAFDKEMSKAARYVGGYYRRYCDDILVIVKAEHVTDFKKFVEDKLANLRLTMQAAKTLECAFTPLADKPLQYLGLVFDGKRILLRSSGVARYYKKMRAGVRQHTKAKTMDGETPLAVQRQKRLLRQYTEHAPEFQRSYPSYVKRVSIAAGSPAIIQQLRRHRRCFKKLMEE

SEQ ID NO: 36 - protein, 461 aa, Brevundimonas sp.
MTGVTTIRQNVNAVAGPGRNIIVNAAGGAQGLNGTRPRRVTSRTLKVREYKHFDDPLDRAALDALVLTSDQVAQHAFFPLLAYTKTRRKIDFSVFPPVVDEKPREIKYAAHMDSAIYATYASVLADKYEAVLAQRQLGSSVLAYRGGIGYNVPFAKSLFDEIRTRGECSVICLDISKFFDCLNHTNLRSRLMGVLGCDHFPDDWLSIFRRLTRFEYVEAKDIEARLGKPKGRRICSIDVFREVIRKLIRRNQKDHGIPQGTPLSGLLANIYMLDFDATVKAWVEARGGSYRRYSDDIAVVLPRGDLEAEFLTLIRAEASAIHLSLNDKKTCRTQFATQGSTLVSAGDQLQYLGFIFDGANIRIRSESMKAFYARMKTNLRRYVRAAKRDGIPADEIRKRVVIGRFTHWGDSRNFVQYAYRAARELDSPAIRRQLRNHVGIFDRYWAQMIAKFYSEAGNVAD

SEQ ID NO: 37 - protein, 307 aa, Vibrio parahaemolyticus
MSAKSPTWYRSRGYLHFDLPISSVKAKRLVTNPELVAKHAFFPLINYSVESKKISKDKASSRIDVTYKERPIAYSSHVDSHIYAYYAELLSVKYESKLKELELSECVLAFRGLGKSNIDFAHEAFEQIKNMGECSAVALDFSKFFDTLDHELLKKSWAAILDTNKLPNDHFNVFKSITKFSKVNKVDLYNEFSISNNNPKKGRNRVCSSKEFRDVVRAKKLIKTNQDSFGIPQGSPISALLSNIYMLEFDAEMNRYVKMYGGKYYRYCDDMLFIVPTGQKKKVAGYAQKKVKGLKVSINPKKTELRT

SEQ ID NO: 38 - protein, 397 aa, Roseobacter sp.
MGIVDCPIAYRQVLKPGRGGGKCNIDFAKDAFDEIDRLGNSVAVALDIKGYFENLDHGRIKRIWCDLLGVQELPLDHYAVFKNITKYRFVDQRAVYSRLGFFGMRERNGNLIPGFLIPFRDMPKQLCSSSDFRAKICGGDPKHGLSLIQKNLLPHGIPQGAPISDLIANFYLLEFDRVLADYARSRGGRYMRYSDDILLILPGGGPEASAAIDFATTEMRKHGPELRIKDAKTCVAKFERTPDGLRFQHLQQHPDEPAKNGFEYLGFRYDGRRVYVRDSTISRFYSKVAGASKRDARRHVESNPAMDADELISSFDFPLFSQRFSKVKKSNLTSDYRSWTFYSYLKRSAEAFGPKGDRILRQARGFDDFMRERVRAAIVSMSGKRKSVIPAVMPGSL

SEQ ID NO: 39 - protein, 434 aa, Pseudovibrio sp.
MHYVNEWQPYRTGSRSKPDKKSRNIRYAARRDAYIYAHYRKILIIKYEERLKQLGISDCPIAYRRIMKTGNAGKCNIDFAKEAFDRIDEIGDCVAIALDIRKFFENLNHAQIKEIWSDLLDVDYLPRDHFAVFKNLTQYRYVDQNEVYTRLGYIEKSIINGTARYKRAEKFKDYKDIPKQLCSPTDFRSKIAGQGAGFTSLISKNTLKVGIPQGTPISDLVANFYLLSFDKAMYSFAKEKNGYYYRYSDDILLILPGARDEAEEARIFALNAITEHGQSLEIKDAKTCIVKYERNRTGLSYEHLGGPQGKNGFEYLGFRFDGTNIYLRDATISRLFRKASATCRREAIRIIKNNPTIDKVALVEKFNISHVCKRYLKVESRELQLDDVKSWSFWTYVKRANQILGRKSDVIPKQINGFKTFLKDRVEAAVYKKK

SEQ ID NO: 40 - protein, 460 aa, Priestia taiwanensis
MKQSKGPRQLHNLSSSSEVNWSKYKQKNYLHFDERIKIEHMKSNIQDPNWIASYAFLPSIHFEIVFNKYITITEVDDQGNKSKRKEKKGKVRKIFYAAHKDSYIYKYYGDLLNNAYNIYARDNGINDIAVAYRNNKKGKNSVDFAFEVFDYLFEQKQAMIISIDFTSFFDKISHKTLKRNIKRVLNVESFSEDWYKVFKNLTKYTYINKTDIDEFLKNKYGVKKFKKLRLANIMEPKEFREFKKGRLEVNREPIGIPQGSGMSAVCSNVHLIDFDAELMKWARQKNVHSRYRRYCDDMILIIPLSTEELDNFDKIKEELLDLVHKYRDDGLIIQGEKTEIRLYKDGEILNEQLKPATLDYLGFVTSGKIMQIREKSLFNYYSRAYRKAKTSKRISLATKRPGPKKELYDLYTHLGHSYQGYGNFVSYAYKAHLKMSRLKSHSLIRRQVKRHWYKVHKRLY

SEQ ID NO: 41 - protein, 423 aa, Burkholderia cepacia; identical to SEQ ID NO: 8

SEQ ID NO: 42 - protein, 419 aa, Dyella sp.
MKSPVPGLEAAQRRRGYVHFDLPLSRKTCEKLVLDPVAVARHAFYPFLRHDQTRPRIKRLGPGKLRKSLKIREIRYAAHADSAIYAYYNDLLTERYEAALASADLGEVTIAFRALKKSNVDFAVEAFEWIHAHQPCTALGFDVQDFFGSLDHGVLKEIWASLLGVPQLPPDHYAVFRSITRHASVELIAARKALGISRQELSRRKRFCEAHEFRSLIRDGGLVNVNKATKGIPQGSPISAGLSNAYMLPFDEVLKAKIFSVGGFYRRYCDDILVVVPDEFAVEMKDLVRDQLSQLKLSMQPTKTLECRFSNGMADKPLQYLGLTFDGARVLLRPAGVARYYAKMRANVKLHKEAKVTDGDTPILQQRRKSLVRMYTEHAPPGHRSYLSYVKLAERKAKSQPIRRQLRLHRRRFRKLIDA

SEQ ID NO: 43 - protein, 357 aa, Fundidesulfovibrio soli
MYPSHGDSAVYSYYAHQLNRYYEIILEKDRLNPHILAFRKTGKNNIDYAHMAFIDISNRHNCTALAFDISKFFDNINHEVLKNKWKEIINTNRLPIDHYKVFRSLTKFAHVELNRALEELQAAPKCKCKKRLCSSQDFRNLIRSKGLIETNTKTHGIPQGSPLSGLLSNISLLDFDRSISDAVHLKNASYYRYCDDILVICANEDACFFKHLVETQLKNVQLSTNNKTNVHKFSKHHDIQCTNIPLQYLGFMFDGKAIYIRSSSIQRFRTRSKKRIYAAIISRNTHNNIRSNRGEPHRELYTRKLYARNTHHGSRNFITYGLRALKTTGSKTIKNQLKKLGRFFEKRLADAKEKYSS

SEQ ID NO: 44 - protein, 427 aa, Vibrio parahaemolyticus
MSSNKPLWYRSRGYLHFDLPVSFKKAKNLVTNPSLVSKHAFFPLINYAVESKKISKNKDTRKIDVAVKERPIAYSSHMDSHIYAYYANLLSKKYEAKLKSAGLTESILAFRGLGKSNIDFAFEAFEQIKIMGECSAVALDFSKFFDTLDHDLLKQSWANLLGEKNLPSDHFNVFKSITKFSKVNKVELYKEFGISPNNPKNGRTRVCTAQEFRDVVRKKKFIKTNKDPFGIPQGSPISALLSNIYMFEFDAEMKRYMDIHGGKYYRYCDDMLFIVPAPLRDKVAGYAQEQVKKLKVSINPKKTELRTFSSQGDILVADQMLQYLGFMFDGENVYIRSSSLARYSEKMKIGIRLAKKTMDKYNAVRAAKGLPEKALYKRKLYSRYTHLGGRNFVTYGLRAASTMQSKTIKRQLKPLWRRFHEELERET

SEQ ID NO: 45 - protein, 428 aa, Pseudomonas guariconensis
MPEHWYKSRGYLHFDRPINQATALEIVSCPKTVARHAFYPFIRYVAQTQKVFFDKSIGKVVKKDPKERPISYAAHVDSHIYSYYCEQLNQAYENQLAKVEWSSAILAFRALGKSNIDFARDAFLDIAVRESCCVIAIDIKGFFDNLDHAHLKGAWQTLLGTSQLPDDHYAVYRSLTKFSFVYRDQAYEALGLSKSNPKQGRKRICEPHEFRAKVRGGGLIETNKDKKGIPQGSPISAMLSNVYMMGFDEQIHAYVQSCGGAYYRYCDDVLLIVPLEREAEAKALVELRVNAIGLEIQAAKTETCKFTRSAKGLRSDRPLQYLGFIFDGANIYLRSSSLARYQDRVHRGVWLAGKCMDKVNTKRIARGQLPRSMFLKKLYKRYSYLGRRNFISYGHRAARIMNAPSIKKQLKPHWNRLRERISDAQGEG

SEQ ID NO: 46 - protein, 364 aa, Vibrio diabolicus
MSSNKPLWYRSRGYLHFDLPVSFKKAKNLVTNPDLVSKHAFFPLINYAVESKKISKNKDTRKIDVAVKERPIAYSSHMDSHIYAFYANLLSKKYEAKLKSAGLTESILAFRGLGKSNIDFAFEAFEQIKIMGECSAVALDFSKFFDTLDHDLLKQSWANLLGEKNLPSDHFNVFKSITKFSKVNKVELYKEFGISPNNPKNGRNRVCTAQEFRDVVRKKKLIKTNKDPFGIPQGSPISALLSNIYMFEFDAEMKRYMDIHGGKYYRYCDDMLFIVPAPLRDKVAGYAQEQVKKLKVSINPKKTELRTFSSQGDVLVADQMLQYLGFMFDGENVYIRSSSLARYSEKMKRGIRLAKKTMDKYNAE

SEQ ID NO: 47 - protein, 424 aa, Escherichia coli; identical to SEQ ID NO: 2

SEQ ID NO: 48 - protein, 424 aa, Alloalcanivorax xenomutans; identical to SEQ ID NO: 6

SEQ ID NO: 49 - protein, 458 aa, Lederbergia citrea
MKGEYACKGFFDRVIGYDYTPLLALPKMNKKKYRVKGYKHLDNKKSIEKVKGKIQNPQWVAKHGFYPFMHFEIKFQKYSRKEKQPKEKVRKIFYASHIDSFIYKYYGDKLNNHYNSVVDELDIKEVATAYRNNLSGKSNINFAKEVIDFIKAQQSAYIFVADFTNFFDTLDHRYLKEKIRNVLKKDTLPDDYYNVFKNITRFSYFIKDSIEAELMTNYTENEIKNSYKYFTEEEFRAFKHKNIYKNSKSYGIPQGAGISSVCSNIYLLNFDKKIQKYVKEQKGLYRRYCDDLIIVIPIDGDVQGYDYQIHQKIVGEIKEQVPNLEIQPEKTGNYFYSNNKINDLEFNDTKLDYLGFSFNGEEVRIREKSLFKYYTRTYRKIRICNRKSKEFGRKSYRRELYKNYSHFGKNKKGHGNFLSYAERAQKIFDEDSKTLNLMETQVKKHWKNIQSRLENPKS

SEQ ID NO: 50 - protein, 457 aa, Paenalkalicoccus suaedae
MKGEYACRGFFNRVIGYDYIPLLALPNMNKNKYRVKGYKHLDNKKSIEKVKGKIQNPRWVAEHGFYPFMHFEIKFQKYNRKEKQPKEKVRKIFYASHIDSFIYKYYGDKLNNHYNSVVDKLGINEVATAYRNNFSGKSNINFAKEVIDFIKVQKSAYIFVADFTNFFDTLDHRYLKEKIRYVLNKDTLPDDYYNVFKNITRFSYFIKDTIEEELKTKYTESEIKNNYKYFTEEEFRAFKHKNIYKNSKSYGIPQGAGISSVCSNIYLLDFDKKIEKYVRKQKGLYRRYCDDLIIVIPIEGEVQDYNYQMHQKIVDDIKKQIPNLKIQPEKTGNYFYSDNLITDLEFNETKLDYLGFSFNGKEVRIREKSLFKYYTRTYRKVRICNRKSKEFGRKSYRRELYKNYSHLGKSKKGHGNFLSYAERAQKIFDEDSKTLNLMETQVKKHWKNIQSRLDQPE

SEQ ID NO: 51 - protein, 59 aa, Shewanella algae
MFDFDSEMKRYMDIHGGKYYRYCDDMLFIVPSQLKNNVAGYAQERVKQLKVSINHKKQS

SEQ ID NO: 52 - protein, 124 aa, Shewanella algae
MVIYISTYLSVLKSKMSCHQSEFSFKACLFPSDKLRRRIKKISKNRTTRKINVALKERPVPILRTLIVTSMHFYADLLSEKYENKLKSAGLSECVLAFRGLRKSNIDFAHEAFQQIKAMGSVVL

SEQ ID NO: 53 - protein, 465 aa, Lysinibacillus capsici
MKDISYFENYKSKNYLHIDKRIPIKRVYKLIQDEKWVSKHAFLPFIHYSIDLKKYTFKEGHSNRSYKKLKLNKNFNQRHIKYKKPKKREINYASHIDSFIYKYYGDELNDTYNKYAIKNGIDENVLAYRNNKKGKNNIHFARDVFDFIIRTEKSLIIALDFSSFFDKISHKHLKTSIKELLHVDELSEDNYNVFKSITKFHYIEKSDLDNHLKSQYSEDELKDMLKYRKINSYMDLKVFRQLVKEKKLNIKANRNPYGIPQGSGMSAVCSNIRLTKFDIEMKCWSDKKNALYRRYCDDLIWIIPNVNDDEMASIVEEIYSIIEKYDDLHLQKEKTIILNYNGNKMLDLHGYDSKLDYLGFIFDGQVIKVREKSLFKFYNRAYKKTKVLAKYNLIYGRNAYMRNFYGLYSHLGRNYKGKGNFISYAYKAQKIMEELPVEVVIRKQVKRHWNKIHKRLEEYKKEYSN

SEQ ID NO: 54 - protein, 429 aa, Enterobacter hormaechei
MESREHPWFRKRGYLHFDKPISIEHALDIVTNPRAVAAHSFLPFITFTSTTYKVQKDKGTNAINKTLKERPIAYSSHVDSHIYSYYAATLNELYENALQIHGISKNVLAFRSLSKSNIEFAYDAFQEIKKRGECSAVALDLSKFFDTLDHSFLKDAWCRLLSTDKLPEDHYAVFKAITKYSKVDKEKVYDLMGIPKNNARYTKKTRKQICSFVDFRDKVRKNALIISNKANFGIPQGSPISALLSNIYMLNFDIEMKDYVATLGGEYFRYCDDMLFIVPQSAKNNVAGEAEKRLKKLKVSLNTKKTEIREFSFASKKIKSDKPLQYLGFVFDGQNIFLRSSSLSRYSDRMKRGVRLAKATMKRKNNIRKHKGLAKKELFKEKIYARYAHVGKRNFLTYGYRASRIMKSNSIRKQLKPLWERLQKEINRS

SEQ ID NO: 55 - protein, 423 aa, Burkholderia pseudomallei
MENPAEWYRRRTYLHFDMPISEKAACAIASNPAVVTRHAFYPFITFTIKSQKVKWDSASKKLSLIPKERPVSYASHVDSHIYAYYAALLSEKYENRLKSADFEPAVLAFRKLGKSNIHFAKDAFSAIKQLGNADVITTDIRDFFGNLDHQILKSAWRSILGVDALPDDHYNVYKSLTRFSWVEKRNLYAALHISLNNPRASGPRVCEPEDFRKIVRGCKLINKNPHSKGIPQGSPISALLSNIYMVNFDEMMWNAVTAWGGKYFRYCDDMLIIAPQGKGKDLLKLAQEFSDLHKLPLHPDKTEERTFTMTVDGLVADKPLQYLGFLFDGKRIILRSASLARYSDRMKRGVRLAKATMRRRNDLRVTRGETPIPLRKRKLFKRYSYLGRRNFVSYALRAAGILEAQAIKRQVKPLWKRLRKQMG

SEQ ID NO: 56 - protein, 436 aa, Vibrio cholerae
MKKMSVPLWYTKRNYLHFDVPVSGTKAEKIVTSTTSVARHAFFPFISYSFQLTKLDRDTSTGKLYRKPKPREVAYSSHIDSHIYAYYANQLSNLYEQKVEKSGLHESVLAFRKLDGKSNIHFADDAFNYIRKMKECSVIALDFSKFFNTLDHRILKEEWSKLLQVKHLPKDHYNVFRSLTKFSTVDRNELFKTFGISQYNQKANGRNRVCTPLEFREKVRGSGLIKPNPNGAMGIPQGSPISALLSNIYMFSFDKHMKNYVDSIGGKYFRYCDDMLLIVPSEYRDTVEKLANSKIAALKVQINSDKTEIRDFKFHNGQLLSFDEFGKQKPLQYLGFLFDGHSIFLRSTALARYSEKMKGGVKLAKKTMEKENRIRKSKGEPEQNQLYKRKLHRLYSYRGRRNFLSYGYRAAKIMNSKSIKRQLKPLWQRLQDEISK

SEQ ID NO: 57 - protein, 424 aa, Thalassobium sp.
MFKKKHPWYRSRGYLHFDSPISFKKAQSIVMSCDRVAKHSFYPLINYQIDSYKVAKDELGKLQKKVKERPIAYASHVDSHIYAYYAWRLNTSYEQKIQAAGLNDNVLAFRSLGKSNIEFADSAFEDIKRRKKCSAVALDVSGFFDNLDHQLLKKSWADLIGVDQLPQDHFNVFKSLTRFSSVNKDRLYAILNISASNPKNARHRVCEANVFRDAVRGAGLIDVNRNCFGIPQGSPISALLSNIYMLEFDKRAKQVMDEQGGSYYRYCDDMLFITTEEYRDDIEHFAQEEIKKLKLSINVKKTEKRDFWINAGVQVCNKPLQYLGFTFDGQRKLLRSAALARFSNRMKRGVRLAKATQRKRNAIKRNRGLNERELYKRKLYERYSHLGKRNFITYSHRAADHMKSDAIRDQVKPLWTRLEREMSD

SEQ ID NO: 58 - protein, 77 aa, Vibrio parahaemolyticus
MKKMSAPLWYTKRNYLHFDVPVSGTKAEKIVTSTTSVARHAFFPFISYSFQLTKLDRDTSTGKLYRKPKPREVAYSS

SEQ ID NO: 59 - protein, 425 aa, Pseudomonas sp.
MKEWFKSRGYLHFDPQVSKIAASRVVAEPEVVAAHSFYPFIRYAVSSQKVFFDKTFKKVEAKEPKVRPISYASHMDSHIYSYYCQLLNNLYEAELASCSWGNSVLAFRSLGKSNIDFAYQAFVDISSKGECCAIALDVKGFFDNLNHNTLKQAWGKLLGCASLPADHYKVFRSLTKFSFVDRDALYERLGISKNNPRNNRVRVCTPSEFRCVVRAEKFVEVNTDIKGIPQGSPISSMLSNIYMMEFDAAVYDHVSRLGGTYYRYCDDILVIVPIGSEGGVTDFVSSQISNMRLEVQSSKTETRTFRIAQYGLRADKPLQYLGFIFDGQRIYLRSASLARYHERKRKGVWLAQKTMEKRNALRIERGQLPRSMYLKKLYSRYSYLGRRNFIAYGYRAASIMGSNSIKKQLKSHWSRLQNRIALAQE

SEQ ID NO: 60 - protein, 436 aa, Vibrio sp.
MKKMSVPLWYTKRNYLHFDVPVSGTKAEKIVTSATSVARHAFFPFISYSFQLTKLDRDRSTGKLYRKPKPRGVAYSSHIDSHIYAYYASQLSSLYEHKVEKFGLHESVLAFRKLDGKSNIHFADDAFNYIRENGECSVIALDFSKFFDTLDHKILKEEWSKLLQVNSLPKDHYNVFRSLTKFSTVDRDELFKVFEISQYNPKANGRNRVCNPTEFREKVRGSGLIKPNPNGAMGIPQGSPISALLSNIYMFSFDEHMKNYVDSIGGKYFRYCDDMLFIVPSEYRGTIEKLANSKIAALKVQINSDKTEIRDFKFHNGQLCSFDEFGKQKPLQYLGFLFDGHSIFLRSTALARYSEKMKGGVKLAKKTMEKENRIRKSKGEPEQDQLYKRKLHRLYSYRGRRNFLSYGYRAAKIMNSKSIKRQLKPLWQRLQDEISK

SEQ ID NO: 61 - protein, 428 aa, Pantoea sp.
MESREHPWFRKRGYLHFDKPISLEHALDIVTNPNTVATHSFLPFINFTSTTYKAHKDKLTRKIIKTPKPREIAYSSHVDSHIYSYYAAILSELYENELVKYGITKNVLAFRSLNKSNIEFASEAFKEITIRGNCSAVALDLTKFFDTLNHALLKDAWCRLLATDKLPDDHYAVFKSITNFSKVEKEKLYDLMKIPKNNAKHTKKTRKQICSFEDFRNKVRKGKLIIPNKDIKAIPQGSPISALLSNIYMLNFDIEMKEYVTSLGGEYFRYCDDMLFILPSEEKDNIAGIAEQKLLKLKVSLNVKKTEIREFSVTPTRIKCDKPLQYLGFIFDGHNIYLRSSSLSRYSDRMKRGVKLAKATMKRKNKIRKTKGLPNKELFKEKVYARYAHVGKRNFLTYGYRASRIMNSNSIRKQLKPLWERLQKEIHK

SEQ ID NO: 62 - protein, 428 aa, Pectobacterium versatile
MESHEHPWFRKRGYLHFDKPISLEHALDIVTNPKAVATHSFLPFITFTSTTYKIQKDKGTNAINKTLKERPIAYSSHVDSHIYSYYAATLDELYENALRTHKITKNVLAFRALNKSNIEFAYEAFQEIKKRGDCSVVALDLSKFFDTLDHSFLKDAWCRLLATDKLPEDHYAVFKAITKYSKVDKEKVYDLMTIPKNNAKHTKKTRKQICSFVDFRDKVRKANLITPNKANCGIPQGSPVSALLSNIYMLNFDIEMNEYVSSLGGEYFRYCDDMLFIIPTHEKNNVAGEAERRLIKLKVSLNIKKTEIREFSVTSSKIKCDKPLQYLGFIFDGENIFLRSSSLSRYSDRMKRGVRLAKATMKRKNKIRKYKGLAKKDLFKEKIYARYAHVGKRNFLTYGYRASRIMNSKSIRKQLKPLWERLQNEVNK

SEQ ID NO: 63 - protein, 129 aa, Arsenophonus apicola
MEFREHPWFRKRGYLHFDKPISVEHALDIVTNPHTVATHSFLPFITFTATTYKVQKDKGTNAINKTLKERPIAYSSHVDSHIFSYYAAILNKLYETELQTHGISKKVLAFRAALKKKVILSLHMKPFRK

SEQ ID NO: 64 - protein, 337 aa, Enterobacter asburiae
MESREHPWFRKRGYLHFDKPISIEHALDIVTNPRAVAAHSFLPFITFTSTTYKVQKDKGTNAINKTLKERPIAYSSHVDSHIYSYYAATLNELYENALQIHGISKNVLAFRSLHKSNIEFAYDAFQEIKKRGECSAVALDLSKFFDTLDHSFLKDAWCRLLSTDKLPEDHYAVFKAITKYSKVDKEKVYDLMGIPKNNAKYTKKTRKQICSFADFRDKVRKNALIISNKANFGIPQGSPISALLSNIYMLNFDIEMKDYVATLGGEYFRYCDDMLFIVPQSAKNNVAGEAEKRLNKLKVSLNTKKTEIREFSFVSKKIKCDKPLQYLGFDLTGKIYS

SEQ ID NO: 65 - protein, 436 aa, Vibrio cincinnatiensis
MKKMSVPLWYTKRNYLHFDVPVSGTKAEKIVTSATSVARHAFFPFISYSFQLTKLDRDRSTGKLYRKPKPRGVAYSSHIDSHIYAYYASQLSSLYEHKVEKFGLHESVLAFRKLDGKSNIHFADDAFNYIRENGECSVIALDFSKFFDTLDHKILKEEWSKLLQVNSLPKDHYNVFRSLTKFSTVDRDELFKVFEISQYNPKANGRNRVCNPIEFREKVRGSGLIKPNPNGAMGIPQGSPISALLSNIYMFSFDEHMKNYVDSIGGKFFRYCDDMLFIVPSEYRGTIEKLTNSKIAALKVQINSDKTEIRDFKFHNGQLCSFDEFGKQKPLQYLGFLFDGHSIFLRSTALARYSEKMKGGVKLAKKTMEKENRIRKSKGEPEQDQLYKRKLHRLYSYRGRRNFLSYGYRAAKIMNSKSIKRQLKPLWQRLQDEISK

SEQ ID NO: 66 - protein, 429 aa, Enterobacter kobei
MESREHPWFRKRGYLHFDKPISIEHALDIVTNPRAVAAHSFLPFITFTSTTYKVQKDKGTNAINKTLKERPIAYSSHVDSHIYSYYAATLNELYENALQIHGISKNVLAFRSLHKSNIEFAYDAFQEIKKRGECSAVALDLSKFFDTLDHSFLKDAWCRLLSTDKLPEDHYAVFKAITKYSKVDKEKVYDLMDIPKNNAKYTKKTRKQICSFADFRDKVRKNALIISNKANFGIPQGSPISALLSNIYMLNFDIEMKDYVATLGGEYFRYCDDMLFIVPLSAKNNVAGEAEKRLNKLKVSLNTKKTEIREFSFSSKKLKCDKPLQYLGFVFDGQNIFLRSSSLSRYSDRMKRGVRLAKATMKRKNNIRKHKGLAKKELFKEKIYARYAHVGKRNFLTYGYRASRIMKSNSIRKQLKPLWERLQKEINRS

SEQ ID NO: 67 - protein, 449 aa, Providencia alcalifaciens
MFSERPQFKVAPVSQLLRTYIMKYPEHLWFRKRGYLHFDKPISLEHALNIVTNPYTVATHSFLPFITFTSSTYKIQKDKGTNSINKMLKERPIAYSSHIDSHIYSYYASILDELYENELQTYNITKNILAFRALNKSNIEFAHEAFQEIKKIGSCSAVALDLSKFFDTLNHNLLKDAWCKLLRKDKLPEDHYAVFKAITKYSKVDKEKLYDLMSIPKNNTKNTKKTRKQICSFVDFRNKVRKSNLIIPNKSALGIPQGSPISALLSNIYMLNFDIEINEYISSLGGKYFRYCDDMLFIVPTHEKNNIAGEAEKRLNKLKVHLNTKKTEIREFSFTSTKIKCDKPLQYLGFIFDGENIFLRSSSLSRYSDRMKRGVRLAKATMIRKNKIRKYKGLSTKELFKEKIYARYAHVGKRNFLTYGYRASRIMNSNSIRKQLKPLWERLQKEINK

SEQ ID NO: 68 - protein, 423 aa, Burkholderia ubonensis
MENPAEWYRRRTYLHFDMPISEKAACAIASNPAVVTRHAFYPFITFTIKSQKVKWDSASKKLSLIPKERPVSYASHVDSHIYAYYAALLSEKYENRLKSADFEPAVLAFRKLGKSNIHFAKDAFSAIKQLGNADVITTDIRDFFGNLDHQILKSAWRSILDVDALPDDHYNVYKSLTRFSFVEKRNLYAALHISLNNPRASGPRVCEPEDFRKIVRGSKLINRNPHSKGIPQGSPISALLSNIYMVNFDEMMWNAVTAWGGKYFRYCDDMLIIAPQGKGKDLLKLAQEFSDLHKLPLHPDKTEERTFTMTVDGLVADKPLQYLGFLFDGKRIILRSASLARYSDRMKRGVRLAKATMRRRNDLRVTRGETPIPLRKRKLFKRYSYLGRRNFVSYALRAAGILEAQAIKRQVKPLWKRLRKQMG

SEQ ID NO: 69 - protein, 428 aa, Pantoea sp.
MESREHPWFRKRGYLHFDKPISVEHALDIVTNPNSVATHSFLPFITFTSTTFKIHKDKGKNAIEKTIKERPIAYSSHIDSHIYSYYSEILDYLYEEQLHTHNISKNILAFRALGKSNIEFANAAFQEIKRRGNCSAVALDLSKFFDTLDHSILKDAWCRLLTTDILPRDHYAVFKAITKYSKVDKEKVYELMAIPKNNAKHAKKTRKQICSFAEFRNKVRKSSLIVPNKANFGIPQGSPISALLSNIYMLNFDIEMDQYASSLGGEYFRYCDDMLFIVPTHEKNNVAGEAEKRLIKLKVSLNVKKTEIREFKATPTKITSDKPLQYLGFIFDGDNIFLRSSSLSRYSDRMKRGVKLAKATMKRKNKIRKNKGLPDKELFKEKVYARYAHVGKRNFLTYGYRASRIMNSNSIRKQLKPLWERLQKEIQK

SEQ ID NO: 70 - protein, 428 aa, Pectobacterium aroidearum
MESHEHPWFRKRGYLHFDKPISLEHALDIVTNPKTIATHSFLPFITFTSTTYKIQKDKGTNAINKTLKERPIAYSSHIDSHIYSYYAATLDELYENELRTHKITKNVLAFRALNKSNIEFAYEAFQEIKKRGDCSVVALDLSKFFDTLDHSFLKDSWCRLLATDKLPEDHYAVFKAITKYSKVDKEKVYDLMSIPKNNAKHTKKTKKQICSFVDFRDKVRKANLIIPNKASYGIPQGSPISALLSNIYMLNFDIEMNEYVSSLGGEYFRYCDDMLFIVPTHEKNNVAGEAEKRLIKLKVSLNIKKTEIREFSVTPSKIKCDKPLQYLGFIFDGENIFLRSSSLSRYSDRMKRGVRLAKATMKRKNKIRKYKGLAKKDLFKEKIYARYAHVGKRNFLTYGYRASRIMNSKSIRKQLKPLWERLQNEVNK

SEQ ID NO: 71 - protein, 423 aa, Burkholderia pseudomultivorans
MENPAEWYRRRTYLHFDMPISEKAACAIAGNPAVVTRHAFYPFITFTIKTQKVKWDSVSKKLSLIPKERPVSYASHVDSHIYAYYAALLSEKYENRLKSAAFEPAVLAFRKLSKSNIHFAKDAFSAIKQLGNADVITTDIRDFFGNLDHQILKSAWKSILGVDALPDDHYNVFKSLTRFSWVEKRNLYAALHISLNNPRASGPRVCEPEDFRKIVRGCKLINKNPHSKGIPQGSPISALLSNIYMVNFDEMMWNAVTAWGGKYFRYCDDMLIIAPQGKGKDLLKLAQEFSDLHKLPLHPDKTEERTFTMTVDGLVADKPLQYLGFLFDGKRIILRSASLARYSDRMKRGVRLAKATMRRRNDLRVTRGETPITLRKRKLYKRYSYLGRRNFVSYALRAAGILEAQAIKRQVKPLWKRLRKQMG

SEQ ID NO: 72 - protein, 428 aa, Vibrio sp.
MERPSNNWYRLRSYLHFDPPISLKKATSIVTNPELVSRHAFYPLINYEIEIQKVSKDKLTKRVIKRPIKLRPIAYPAHLDSQIYSYYSYIISKEYENLLNESNLSDSILAFRKLGKSNIDFAFDAFCKIKDFGECSVVALDITGFFDNLNHEKLKKMWSKTIGEERLPQDHFNVYKSLTKYSKVDRNTLYKLLGISLNYRNHTKVKLCEPKEFRESVRKSKLIKVNKDCFGIPQGTPISAMLSNLYMLDFDKNIKAFVDGFSGKYFRYCDDILIISPQDKKDAVIQHVKKEIELIKLSINEAKTEVRDFVLVDGNLYTPHHLQYLGFMFDGKNIYLRSSSLARYSERMRRGVRLAKKTMQKYNKQRIEEGKSERGLYKKKLYSRYTHLGKRNFITYGMRASKKMDSLEIKKQLKPLYSRLQEEINKKL

SEQ ID NO: 73 - protein, 189 aa, Shewanella sp.
MESNKSNNGIPQGSPISALLSNIYMLTFDEKMNEYANSINGRYFRYCDDMLFIVPVIERDKVQEYVKNEIGLLKVEINESKTEIRDFKVILDKVVSFENDKLKPLQYLGFLFDGTSAYLRSASLSRYSEKMKGGIKLAKMTMEKENKIRLSKGEPAQTKLYKRKLHCLYSHRGQRNFLSYGYRAANIIL

SEQ ID NO: 74 - protein, 429 aa, Enterobacter roggenkampii
MESREHPWFRKRGYLHFDKPISIEHALDIVTNPRAVAAHSFLPFITFTSTTYKVQKDKGTNAINKTLKERPIAYSSHVDSHIYSYYAATLNELYENALQIHGISKNVLAFRSLHKSNIEFAYDAFQEIKKRGECSAVALDLSKFFDTLDHSFLKDAWCRLLSTDKLPEDHYAVFKAITKYSKVDKEKVYDLMDIPKNNAKYTKKTRKQICSFADFRDKVRKNALIISNKANFGIPQGSPISALLSNIYMLNFDIEMKDYVATLGGEYFRYCDDMLFIVPQSAKNNIAGEAEKRLNKLKVSLNTKKTEIREFSFVSKKIKCDKPLQYLGFVFDGRNIFLRSSSLSRYSDRMKRGVRLAKATMKRKNNIRKHKGLAKKELFKEKIYARYAHVGKRNFLTYGYRASRIMKSNSIRKQLKPLWERLRKEINRS

SEQ ID NO: 75 - protein, 428 aa, Hafnia paralvei
MESREHPWYRRRGYLHFDKPVSLEHALDIVSNPELIATHSFLPFITFTSASYKIKQDKGTSAINKILKERPIAYSSHVDSHIYSYYAAILSEFYEKELQLHNVNKNVLAFRTLNKSNIDFAYEAFREIKIRGNCSAVALDLSKFFDTLDHGFLKEAWCRLLGKDKLPEDHYAVFKAITKYSKVDKNEVYDLMGIPKNNTKNAKKTRKQICTFVDFRNKVRKGKLIVSNKAGFGIPQGSPISALLSNIYMLNFDIEMNEYVSSLGGVYFRYCDDMLFIVPTEEKNNIAGEAEKRLIKLKVSLNIKKTEIREFSVSPTKIRCDKPLQYLGFLFDGDNIFLRSSSLSRYSDRMKRGVRLAKATMKRKNKIRKLKGLSKKELFKEKIYARYAHVGKRNFLTYGYRASRIMNSNSIRKQLKPLWERLQKEISK

SEQ ID NO: 76 - protein, 430 aa, Rhizobium paranaense
MFAPKGERGKSKDRPIRFAARLDSCIFSYYRYLLSEPYEQKLKAEGLDHSVIAYRHIPKARGESGQSNIDFALSAFRTVQRLGNCCAVALDISSFFENLDHDRLRSVWADLVGQSRLPSDHYKVFEAITRYAFVDVKTAYERLGYFGDKEDRYGNVRKGYLRSRQDIPIQLCNGKQFREKIAGNGSLPSIIEVNKTGKGVPQGAPLSDLLANAYLLEFDKFIRDVCSELGGTYFRYSDDILIVAPISASQAIALEERVRNAISVYGAGLLIKEEKSAIHQFSVTGARQQVNVVKATGKNGKPALNKPFEYLGFRYDGQSAFIRDKTMSNLHRKIASICRATAIRLIKRYQGKSMDEIMALADFEQLYQSFGSVKDFYEKYHDYRSWTFTTYAKRAVKEMGQLGAPITKQLRRLRQSIEERLRKEICRVRA

SEQ ID NO: 77 - protein, 426 aa, Undibacterium seohonense
MFKKKHPWFRRRGYPHFDQQIHFDKAKRIVCSPSQVARHSFYPFITFDVETVKVKQNRKTGKIEKQPPKKRSISYASHVDSHIYAYYSLQLSKQYEAAIDKYGLNECVIAFRSLGKSNIQFAAEAFDEVKKRKNCHVLCLDITGFFDNLDHQLLKSAWARLLQLAQLPDDHYAIFKSLTRYAKVDRLDLYRVFGKSTNNLSAKAERLCSPDQFRCQVRGANLVTRHASNKGIPQGSPISALLSNIYMFDFDREVNSFVKEFNGCYFRYCDDMFLVVPDAFKDVTYSFVENAIGKIKLDLQSKKTERVDFSDSSGQLKSNKPLQYLGFIFDGNQILLRSASLARYSDRMRRGIRLAKSTMLKRNEARKARGDDEKPLFKKKIFNRYTHLGRRNFLSYGYTASKIMQSKAIKRQLGRLWSRVQDEIKS

SEQ ID NO: 78 - protein, 428 aa, Thalassospira xiamenensis
MFKRKHWYRRKNYAHFDDRLSPQAAKAYVSDPENVARHAFYPFIEFVILTRRYRTEKRADSSGRMIKRRKGIDPKKRPIKLSSHKDGYIFSYYARKLSDLYESHISGKDFAESVIAYRPNMGTNYSNAVDAFRFLQATGKAKVITLDISSFFENLDHRQLKAKWLEVLSEDRLPQDHYKIFRALTKYSTVSIEDVCEEFGLDQRDIIKGKVERICSSSDFRNRLRAKIPKVIKVHSDQYGIPQGSAMSAVLSNIYMLDFDSEVHSLCKENGIFYRRYCDDIIFIQPLPESIDVLDKVRAILYASGPNLEISGAKTKRNIYDGSRVVGQPVEYLGLTFDGNKILIRNGSLAKFHRKLRVAVAYRKSLAQRRKGRHAGKVFLRSLYKRYSWKMSNMSFHGYAKRVESSSILSSVKRQLRKSQTQLENLLK

SEQ ID NO: 79 - protein, 446 aa, Neisseria elongata
MFNFMSTSNPSWYKCRGYLHFDSPINSRQAISLVTSPKKVVTHSFYPFLSCTLSMPKVKKENGELKRDAKEREIAYASHKDSHIFSYYTHILNGKYENLIENKYHSINNSVLAFRKLGKSNIEFAKYAFDYILKYKNCSVIALDVSNFFGNIDHNILKEKWKKIISNDTLPPDHFAVFKAITQYSIIKKEIAFKEFGISIHTPRSNSRKQICSPEEFRKFRDEFNDTLLKGNQVIYSNKGKGKGIPQGSPISALLSNIYMIDFDIIVQDIIQEKNGLYMRYCDDILCIIPSDKLEIIRTFIKNEIKKLKLDINEKKTEIVNFKFDQEKNKITNDKKLQYLGFILKNESITIRPAAFTKYSKKMKRGVSLAKQTQRKYNKIRELNGKEKKKIFKHKLFVTYSHLGKRNFVSYGKRAAWIMESKQIRKQLKPLFNRLKARIKDCDTLE

SEQ ID NO: 80 - protein, 429 aa, Cupriavidus taiwanensis
MGFKKRSPDWFKRRTYIHFDLPIGRDAATKLVKDPARVKAHAFYPLISFDITSSKVKWDKSKKKLISTPKVRTIRYAAHLDSHIYSYYCELISTLYEAYLEKCSYASSVLAFRKLGKSNIHFAAEAFDAIREIGNADAIALDISDFFGSLDHRILKASWAKLLSQPTLPADHYNIFKSLTQFAYVDRDSVFGRFKISVHNPKSNRKRICEPDEFRDIVRRGGLILRNNHGKGIPQGSPISALLSNVYMMDFDLAMSEAVRNIGGRYFRYCDDMLIIVPAGHGGAMKAVAETQIKLFSLDIQAKKTEERTFIKTGSAITSNRPLQYLGFLFDGQRVLLRSSSLARYSERMRRGVRLAKATVRSRNAKRLERGEIVVPLRIGKILKRYSYLGRRNFISYAIKAAESMNADGVRKQIKPHWKRLTAEIRSAR

SEQ ID NO: 81 - protein, 225 aa, Xanthomonas campestris
MGISRRKSEGSDRLCSIADFKGKVKAAGLIETNAAAKGIPQGSPMSALLSNVYMIVFDRAMKKLASGVGGYYRRYCDDILLVVPELAVEDVKKEVAASLAELKLEMQESKTLECRFAPIADKPLQYLGLVYDGKSTFLRPSGVAKFYNKMRAGVMVYRNAKVRDGKTHLLIQRRKELIQRYTEHVGFGKRNYFSYVKPAAVRAKSAEIRRQLRFHAKRFGKLAAI

SEQ ID NO: 82 - protein, 421 aa, Stenotrophomonas maltophilia
MGKEIPKSALEAAYVLRKYVHFDTPLPRLVCKQLVCDPEAVRRHSFYPFIRHDNVRNKFKRIGPGLVKKSKKVREIRYAAHADAAIYAYYNFLLTERLEVELKARGLSENVIAFRALKKSNVDFAQEAFEWINCHRPCTALGFDVRDFFGSLNHRLLRDQWASLMGLQSLPGDHFAVFKSLTRHASVELIAARRALDLSRTSLGRLDRLCDAATFRIAIRGGNLIEVNSKDRGIPQGSPISAALSNIYMLPFDEKLKGAIEDLGGIYRRYCDDILVIVPGADVGAIYKLVESELAALALTVQDTKTVKSHFDAEKAPVPLPYLGLTYDGIQVFLRASGVSRFYVKMRRGVKQFRDAKKTDGGVALLVQRRKNLLNRYSEHAPKNGRSFLKYAKMAARKTGSNVISSQLRAHRKRLKSLIEH

SEQ ID NO: 83 - protein, 421 aa, Xanthomonas sp.
MGKETPKSALEAALVRRRYVHFDAPLSRSACEQLVCDPEAVRRHAFYPFIRHDNVRNKFKRIGPGQVRRSKKIRDIRYAAHADAAIYAYYNFLLTRRLEDELKARHLAENVIAFRALNKSNVDFAQEVFSWINSHRPCTALGFDVRDFFGSLDHSLLREQWISLMGFKTLPDDHFAVFKSLTKHASVELIAARKALNLSRTSLARIDRLCDSAAFRTNIRGGNLIEINPKDRGIPQGSPISAALSNIYMLPFDEKVKSAVEARGGMYRRYCDDILVVVPGEDVGAIYKLVKSELDALKLAMQDAKTVESYFESGRSARPLPYLGLVYDGVEVFLRASGVSRFYVKMRRGVNQFRSAKTSDGGVALLVQRRKHLLNRYSEHTPKDGRSFLKYAKMAARKTGTGAVSTQLRAHRRKLKALMED

SEQ ID NO: 84 - protein, 482 aa, Rhizobium sp.
MGTIVKAWTASVRRYPHFDPVISVAEAEALATDPARVATHTFYPFLKYDEGWTVYAKKGRHGKRKDRPIRFAARLDSCIFSYYRHILSVPYEARLQTEGLSDSVVAYRRISKPGGSGGQSNIDFALSAVEAIQSQGNCCAIALDISSFFETLDHGRLRDVWAELLGVSRLPADHFKVYQTITRYPFVDIIKAYTRLGFYGDKTDRNGKVRPGFLKARSEIPVQLCDGRTFQAKIARSATQSSIIEVNKLCIGVPQGAPLSDLLANAYLLEFDKYLRDICINFGGRFFRYSDDILVIAPILEADAIVLEKEIRSAITTYGKGLLIKEEKSAIHRFEVEGERQEVRTIKASDKDGRPMPNKPFEYLGFRYDGRHVFIRDKTMSNLHRKIASVCRATAIRQVKRYQGKLTHDILALTDIEKLIQAFGSVEDFHMKAADYRSWTFTTYAKRASKTMGALGKPIARQIKNLRSAIHRRLEYELTRAQ

SEQ ID NO: 85 - protein, 426 aa, Pseudomonas aeruginosa
MGTNLGGYLHFDRPINQAAALEIVSSPKTVAKHAFYPFIRYVAQTQKVFFDKSIGKVVKKAPKERPISYAAHVDSHIYSYYCELLNQAYEDHLAKVQWSPAILAFRTLGKSNINFAREAFLDIATRDSCCVIAIDIKGFFDNLDHAHLKSAWRTLLGTNQLSDDHYAVYRSLTKFSFVYRDQVYETLGLSKNNPKPGRKRICEPHEFRTKVRDGGLIKTNKDKKGIPQGSPISALLSNVYMMGFDEQIHTYVQTCGGAYYRYCDDVLLIVPLEKEAEAKALVEQRVNAIGLEIQASKTETCKFKRSAMGLRSDRPLQYLGFIFDGANIYLRSSSLARYRDRVKKGIWMAEQCMEKVNAKRISRGQLPRSMFLKKLYKRYSYLGRRNFISYGYRAARIMNAPSIKKQLKPHWNRLRKRISDAQGERH

SEQ ID NO: 86 - protein, 428 aa, Massilia brevitalea
MGTSKRSWYRRRGYPHFDHPISYGDAKRIVKDPNQVARHSFYPFVEFSLQTFKLKKDPVTSKLKRVGKTRPIAYASHVDSHIYSYYSLKLAKQYEKTISHYGLGEAVLAFRALGKNNIEFAANAFDVIRGHGDCYVLAFDISGFFDNLDHQILKQMWARVLNVPSLPVDHYSVYKSLANFAKVELSALYKLFGYSLNNKNTVPKRLCSAKEFRDVVRSANNLVTVNGSKKGIPQGSPLSALLSNIYMLEFDIALNEFVKSRGGHYFRYCDDILVILPPEAGEAEENFVLSEISKLKLNVNPDKTDRVRFSCSASGEILGSKALQYLGFLFDGKKVFLRSASLARYLQKMRRGVRVAKATMEKRNEARHARGDATTTLFKKTLYKRYSHIGRRNFLTYGYSAAQTMKSEAIRRQLRVLWGRLQDEINAS

SEQ ID NO: 87 - protein, 480 aa, Pelagibacterium sp.
MGWGNVLAAWSAVVRQYPHFDPLISKTDAEGVATDPKRVAEHKFYPFLKYDDRWTRFAPKGAKGKVKSRPIRFAARLDACVFSYYRTKLSARYEAWLSAAGLEGEVLAYRRIPKKNGGGKSNIEFAKEAFDTVRAYGSCCVVALDISDFFENLDHGVLQRRWAALLDAKLLPADHFQVFKALTRYAYVDVKKAYERLGYFGLKTRPDGSKVEGYLRAKKDIPKQLCDGRTFRSKITGDGADPSIIVVNKTGKGVPQGAPLSDLLANLYMFEFDKAVSDRMESLGGTYMRYSDDILLIAPVNVAEGEKLEEWVRKSIATYAPGLDIKEEKSSLHLVEPDGSDQRVSAILPSGKPNKNLEYLGFKYDGKHILIRDKTMSSLYRKVAANCRAIAHSFAKRYQGKSTAEIMSMANVEKLIQAFGPVRDFETKSDDYRKWTFSTYVKRASKVMGPLGNPISRQTRRLRSVIRQRLEADLLDIVGH

SEQ ID NO: 88 - protein, 399 aa, Litoribrevibacter albus
MHAFYPLISYEIETVKISKDETGSIRKKPKIRPIKYAAHIDSHIYAYYTYQLSKSYETKITEYGLNESILAFRSLGKGNIEFANQAFEDIKKQMNCVAVALDVTGFFDNLDHLILKQAWANVIDCSYLPDDHFNVFKSLTEFSEVALDEVYCKLGISKHNSKKGRFKLCDAATFRNLIRGSGIIKTNSQSKGIPQGSPLSALLSNIYMLEFDKWAKEVINLCSGHYYRYCDDILFIVPEEVSKEIESRASLRIQDLRLSINPDKTEIRKFWTKGTTQFSNKPLQYLGFTFDGRSKLLRSAALARYSGKMKSGVRQAMKKRNKENLLRLEQGIPIQDIYRKKLYKRYSHLSNRNFITYGHRAAKIMGSSAIRKQLKPLWSRLQKEIEKANKTNTFPSIYS

SEQ ID NO: 89 - protein, 427 aa, Alteromonas macleodii
MHRKKHVWFKRRGYLHFDSPVSFKKAQKLVNSPKRVSTHSFYPLIHYSIKSFKVKLNAAGEIEPKWKTREIKYAAHLDSHIYAYYSWILGKRYEEEVQRRGLHENVLAFRSLGKNNIDFANDVFEIIKKKGRCSAVGLDITGFFDNLDHQVLKRVWSNLLGLKKLPDDHFAVYKSLTKYAYVDRTILFRELGISLNNPKLNRHRACTAEEFREKVRNGGLIHRNQNDFGIPQGSPVSALLSNIYMLDFDSKMKTELESQGGHYFRYCDDMLFITKPVLREDIERFALDEINKLELEINSAKTEVREFYRYGGQLRCKGKKSLQYLGFTFDGERKLIRSAALAKFSNRMKAGVRSARKTVRRTNSELLKNGSPPSEQLRKKKLYERYSHLGRRNFLTYGYRAAKKMNSSAIKKQLKPMWSRLQKEMTK

SEQ ID NO: 90 - protein, 431 aa, Methyloversatilis discipulorum
MIKKEAPPPWYRLRRYLHFDNPLGLKKAELLVTDTTAVARHSFWPLIQFEIESAKIRKNKATGKISTKIKKRPISYAAHSDSQIFSYYCQLLSEAYESEILTRELSNSVLAFRSLGKSNIDFAKQAFDTIKTMGDCTALAFDITKFFDTLSHRILKQQWKELLKAPQLPPDHYAVFKAVTRFSFVDRNSAFAALKISVHNPRTGGKRRLCSPSQYRDLIRGANLIKTNPKGVGIPQGTAISALLSNIYMLEFDSMASDFVQRNGGTYMRYCDDILFLIPLEKKKITEDFLSEELKKLEISINPDKTEARNFTVTDGLQNADRPLQYLGFLFDGQRITIRPAAFAKFSNRMKKGVSLAKLTKNKRDKLRLTNGAQERPLYCKKLFTRYSHLGKRNFLRYGYSAAHLMNSKAIRRQLRPLWTRLQREINKENK

SEQ ID NO: 91 - protein, 437 aa, Conchiformibius kuhniae
MIKKPNHPWFKKKGYLHFDMPISVKQAESLVLSKQNIKSHSFYPFLHYEIPKLKVRVIDGKITRDKKSNPNIKKRPISYAAHRDSHIFAYYNYILSQKYEDIILNSYNHLDKCVLAFRKLGKSNIDFAKLAFDTIRELGNCSVLALDITGFFDNLNHEILKKSWCRILNTDILPEDHYAVYRAITKFSKINVNDVLQHFCIPKNTANLKSYKRICSAQEFRSFRKQYPNKITQNSKNIGIPQGSPISALLSNIYMLDFDISVFEYINKLNKNFVYMRYCDDILCIVNKENINAVNDFVIKKIEELRLTINQEKTEIVHFSQYQAKQLKSDRALQYLGFIMENNSISLRSTGLTRYSNRMKRGVSLAKQTHRKYSIIRSSRGKPIKKLYKKQLYSRYSHFGRRNFISYGKKAATAFKSKIISKQLYSLHKRLIREIAS

SEQ ID NO: 92 - protein, 437 aa, Conchiformibius kuhniae; identical to SEQ ID NO: 91

SEQ ID NO: 93 - protein, 478 aa, Agrobacterium sp.
MKAWTASVRRYPHFDPVIDAAEAEAIATDPARVVTHTFYPFLKYDEGWTQFAEKGKHGKRKDRPIRFAARLDSCIFSYYRYLLSAPYEAILQAERLSSSVIAYRRIPKSSGSGGQSNIDFALSAVQAIQTQGNCCTIALDISSFFETLDHNRLQSVWADLLEVSKLPADHFTVYRAITRYAFVDVVKAYTRLGYYGDKSDRNGKVKPGYLKARKDIPVQLCDGRTFREKIARSATQTSIIEVNKLGMGVPQGAPLSDLLANAYLLEFDKYLRDTCDELGGCFFRYSDDILVIAPISETDAVQLEKEIRGAIATYGKGLLIKEEKSAIHRFDVQGDGQAVRTIKATDKDGKQMQNKPFEYLGFRYDGRCAYIRDKTMSNLHRKIASVCRATAIRQVKRYRGKPINDIMALTNVEKVIQAFGSVEDFHLKAADYRSWTFTTYAKRASKTMGALGMPIARQIGKLRAAIRRRLESELIRAL

SEQ ID NO: 94 - protein, 478 aa, Agrobacterium tumefaciens
MKAWTASVRRYPHFDPVIDAAEAEAIATNPARVVTHTFYPFLKYDEGWTQFAEKGKHGKRKDRPIRFAARLDSCIFSYYRYLLSAPYEAILQAERLSSSVIAYRRIPKPSGSGGQSNIDFALSAVQAIQTQGNCCTIALDISSFFETLDHNRLRSVWADLLGVSKLPADHFTVYRAITRYAFVDVVKAYTRLGYYGDKSDRNGKVKPGYLKARKDIPVQLCDGRTFREKIARSATQTSIIEVNKLGMGVPQGAPLSDLLANAYLLEFDKYLRDTCDELGGCFFRYSDDILVIAPISETDAVQLEKEIRGAIATYGRGLLIKEEKSAIHRFDVQGDRQAVRTIKATDKDGKQMQNKPFEYLGFRYDGRCAYIRDKTMSNLHRKIASVCRATAIRQVKRYQGKPINDIMALTNVEKVIQAFGSVEDFHLKAADYRSWTFTTYAKRASKTMGALGMPIARQIGKLRAAIRRRLESELIRAL

SEQ ID NO: 95 - protein, 478 aa, Brucella endophytica
MKAWTASVRRYPHFDPVISDAKAEAVVTDPTRVAKHTFYPFLKYDEGWTVYAEKGKHGKRKDRPIRFAARLDSCIFSYYRHLLSVPYEARLQAEGLSDSVIAYRRIPKNKGGGGKSNIDFALSAVEAIQSQGNCCTIALDISSFFETLNHERLREVWTELLGVPRLRDDHFKVYRAITRYAQVDVVKAYTRLGLYGDKTDRNGKVRPGYLKAKSEIPVQLCDGRTFQAKIARSATQPSIIEVNKLDVGVPQGAPLSDLLANAYLLEFDKYLRDICSKFSGRFFRYSDDILVITPIPEVDALELEKEIRNAITTYGKGLLIKEEKSAIHRFEVGGSRQTVRTIKASDKDGKTMPNKPFEYLGFRYDGRHVFIRDKTMSNLHRKIASVCRVTAIRQVKRYQGKTIHDILALTDIEKLIQAFGSVEDFHLKAGDYRSWTFTTYAKRASKTMGALGKPIARQIKNLRSAIRRRLEYELTRAR

SEQ ID NO: 96 - protein, 477 aa, Rhizobium lemnae
MKAWTASVRRYPHFDPVISEADAEAVATDPKRVAAHTFYPFLKYDEGWTAYAKKGKKGKRKDRPIRFAARLDSCIFSYYRYLLSKPYEARLSSEALSNSVIAYRRIPKLAGGGGQSNIDFARSAVEAIQSQGNCCAIALDISSFFETLDHLQLRDVWANLLGVARLPDDHFKVFKAITRYAFVDVKKAYIRLGYYGDKTDKHGRTRPGYLVSRDKIPVQLCDGKTFREKIGRSSTQPSIIEVNPHAMGVPQGAPLSDLLANAYLLEFDKHLRDICTKLGGCFFRYSDDILVIAPISANDAIALEKDIRDAITLYGKGLVIKEEKSAIHQFESKGSKQNISTIKASDKDGKPMPNKPFEYLGFRYDGRHVYIRDKTMSNLHRKIASVCRAVAIRQRKRYQGKAYQDILALTNCEKVIQVFGSVEDFHSKAADYRAWTFTTYAKRASKTMGELGKPIPRQLKNLRAAVYRRLDYELSRV

SEQ ID NO: 97 - protein, 478 aa, Allorhizobium taibaishanense
MKAWTASVRRYPHFDPVISEAEATDIATDPDRVRLHTFYPFLRYDEGWNAYTEKGKSGKRKDRPIRFAARLDSCIFSYYRHLLSAPYETKLQSEGLADAVIAYRRIAKASGGGGQSNIDFSLSAVEAIQSQGDCCSIALDISSFFETLDHDRLLDVWAELLGVPRLPNDHFKVFQAITRYAHVDVIQAYTRLGFYGDKTDRHGRTRPGYLKPRKEIPVQLCDGRTFQAKIARSATQPSIIEVNKCGKGVPQGAPLSDLLANAYLLDFDKYLRDVCSEFGGKFFRYSDDILVIAPISEIDARKLEADIRGAISTYGKGLVIKEEKSAIHRFEVNGDRQAVFTVKAADKSGNPMPSKPFEYLGFRYDGKHVYIRDKTMSNLHRKVASVCRATAIRQAKRYRGKTVHDILALTNIEKLIQAFGSVKDFKSKSADYRKWTFTTYAKRASKTMGPLGKPIERQIKNLRSAIHRKLEYELNRAR

SEQ ID NO: 98 - protein, 478 aa, Rhizobium sp.
MKAWTATVRRYPHFDPVISTAEAEAVATDPSRVATHTFYPFLKYDEGWTAYAEKGKKGKRKDRPIRFAARLDSCIFSYYRHLLSVPYEALLEAEGLSESVIAYRRIPKTSGGGGQSNIDFALSAVQAIQSQGDCCTISLDISSFFETLDHQRLRDVWADLLGVSRLPADHFKVFKAITRYAYVDVVEAYTRLGYYGDKTDRHGKSRPGFLMSRKTIPVQLCDGRTFQEKIARSAIQHSIIKVNDLGVGVPQGAPLSDLLANAYLTEFDKYLRDISSKLGGKFLRYSDDILVIVPIAEADAIKLEIDIRGAIAAYGKGLVIKEEKSAIHRFEVDGGRQIYRTIKASDKEGNSTPNKPFEYLGFRYNGKHVFIRDKTMSNLYRKVASVCRATAIRQAKRYSGKSVHDILAVTDIEQVIQAFGPVKNFKAKSADYRAWTFTTYVKRALKTMGPLGKPIARQTSNLRRAIHKRLEQELKRLV

SEQ ID NO: 99 - protein, 397 aa, Janthinobacterium sp.
MKDSVQVSKHSFYPFIEFTIESFKVKRTGPEGKLKRIQKLRPIAYASHVDCHIYSYYSLQLGKKYEQEISRRNLQDCVLAFRSLAKSNVDFAFEAFEAIRNFGKCEAIALDVTGFFDNLDHVLLKNVWAGLLGQSQLPADHYAVFKSLTKYSTVNLEKLYSLLGVSMNNRNTAPLRLCTAQEFRSKIRGSKLVVKHPLKKGIPQGSPISALLSNLYMLDYDSAMKDFVDTVGGHYFRYCDDILLIVPPGFKATVESLAVSEITKLLLDVNPKKTDRVDFVLTTSGLRASTPLQYLGFLFDGQRILLRSASLARYSERMRTGVRLAKATMRKRNAVRVDRGEAARPLFRKKLNSQYSHLGRRNFITYGYDAARRMESQAIRKQLRVLWKRLQNEIDSD

SEQ ID NO: 100 - protein, 425 aa, Pseudomonas sp.
MKEWFKSRGYLHFDPQVSKITASRVVAEPKVVAAHSFYPFIRYAVSSQKVFFDKTYKKVQAKEPKVRPISYASHMDSHIYSYYCQLLDDLYETELASCLWGDSVLAFRSLGKSNIDFAYQAFVDISSKGECCAIALDVKGFFDNLNHNTLKQAWGKLLGCASLPADHYKVFRSLTKFSFVDRDALYERLEISKNNPRNNRIRICTPSEFRDVVRAEKFVEVNTDIKGIPQGSPISSMLSNIYMMEFDAAVYDHVSRLGGTYYRYCDDILVIVPIGSEGGVTDFVSSQISNMSLEVQSSKTETRTFRIAQYGLRADKPLQYLGFIFDGQRIYLRSASLARYQERKRKGVWLAQKTMEKCNTLRIERGQLPRSMYLKKLYSRYSYLGRRNFIAYGYRAASIMGSNSIKKQLKSHWSRLQNRISLAQE

SEQ ID NO: 101 - protein, 457 aa, Bacillus alkalisoli
MKGEYACKGFFNRVIGYDYIPLLALPNMNKKKYRVKGYKHLDNKKSIEKVKGKIQNPRWVAKHGFYPFMHFEIKFQKYSRKEKQPKEKVRKIFYASHIDSFIYKYYGDKLNNHYNSVVDKLGINEVATAYRNSFSGKSNINFAKEVIDFIKVQKSAYIFVADFTNFFDTLDHRYLKEKIRYVLDKDTLPDDYYNVFKNITRFSYFIKDSIEAELKTKYTESEIKNSYKYFTEEEFRAFKYKNIYKNSKNYGIPQGAGISSVCSNIYLLDFDEKIEKYVKKQKGMYRRYCDDLIIVIPIEGEVQDYNYQIHQKIVDDIKEQIPNLEIQPEKTGNYFYSDNQITDLEFNETKLDYLGFSFNGKEVRIREKSLFKYYTRTYRKVRICNRKSKEFGRKSYRRELYKNYTHLGKSKKGHGNFLSYTERAQRIFDENSNTVNLMETQVKNHWKRIKSRLEEPK

SEQ ID NO: 102 - protein, 457 aa, Bacillus cereus
MKGEYACKGFLKRVIGYDYIPLLALPDMDKKKYSIKRYKHLDKKKSIEKVKDKIQDPQWVAKHGFYPFIHFEIKFQKYSRKEKQAKEKVRKIFYASHIDSYIYKYYGDELNNHYNCIADELGISDIATAYRNNLSGKSNIDFSKEVIDFIKSQKAAYIFVADFTNFFDTLDHKYLKNKIRQVLKEDTLPDDYYNVFKNITRFSYFFKDAIEMDLETKYTESEIKGSYKYFTEEEFRDFKHKNIYRNTKGYGIPQGAGISSVCSNIYLLDFDKEIQNYINEQNGIYRRYCDDLIIVIPIEGEFKDYDYTIPQTIVENIKMKIPNLKIQPEKTGNYFYTNDKIIDLEFKNTKLDYLGFSFNGEEVRIREKSLFKYYTRMYRKIRICNRKSKEFGRKSYRKALYRNYSHLGKKKKGHGNFLSYASRAQEIFDKESSTVNLMETQVKKHWKNINARLEDPE

SEQ ID NO: 103 - protein, 205 aa, Photobacterium leiognathi
MKILIKDWFKPRKYIHFDLPINSKKASKIVTDSEVVAKHAFYPLINYDIVINKITKNPITKNIMVLEPKPRPISYPAHIDSHIYSYYSKILNYKYEKMIKENGLSDSILAFRTLGKSNIDFSLNAFNEIKKLGECSAVALDITKFFDTLDHETLKLKWCNLLDVKRLPNDHYNIFKSITKYSKVKKEDLYKALGISLNNPNKKKT

SEQ ID NO: 104 - protein, 257 aa, Photobacterium leiognathi
MKILIKDWFKPRKYLHFDLPINSKKASKIVTDSEVVAKHAFYPLINYDIVINKITKNPITKNIMVLAPKLRPISYPAHIDSHIYSYYSKMLNYKYEKMIKENGLSDSILAFRTLGKSNIDFSLNAFDEIKKLGECSAVALDITKFFDTLDHEILKLKWCNLLGVKRLPNDHYNIFKSITKYSKVKKEDLYKGLGISLNNPNKKRRRICEPHDFRGIVRKYKLIKVHKDSFGIPQGTPLSAMLSNIYMFDFDLKMNIL

SEQ ID NO: 105 - protein, 403 aa, Photobacterium leiognathi
MKILNKDWFKPRKYLHFDLPINRKKASKIVSNSETVAKHAFYPLINYDILINKIKKNPITKNIMVSEPKKRPISYPAHIDSHIYSYYSKKLNHQYEKAIKENGLNNSILAFRTLGKNNIDFSLDAFNEIKKLGECSAVALDITKFFDTLDHDILKSEWCKLLGLSQLPKDHYNIFKSITRYSTVNKEYLYKALGISLNNPNKTRRRICEPHDFRSIVRKYKLIKVHKESFGIPQGTPLSAILSNIYMFDFDLKMNSFITQLGGKYFRYCDDILFITPTEHKLKVKKKASFEIESLKLELNKNKTEIRTFKFKGKQLKSDKPLQYLGFIFDGNNIYIRSSSLARYSSRMHKGVRLAKNTMIKYNKIRRANQEEERLIFKRKLYSRYSYLGKRNFITYGYLAAKK

SEQ ID NO: 106 - protein, 426 aa, Zoogloea oryzae
MKKEKHPWYKPRGYVHFDAPLGLVGAEKLAQNPDKVARHSFYPFIRYGVTTQKVAKNSVTRKVYRKDPKLRHIAFASHADAHIYAYYSHVLGAAYEERIKCYGLGGSVLAFRSLGKSNIEFANDAFNEICRVGECFVFATDITGFFDNLDHQILKKAWIDLVGFESLPKDHYAVFRSLTNYSYVIKGELFDLLGFSENNAPRAPSRFCSPRDFREKVRYSGLVRRHGEVKGIPQGSPISAMLSNLYLLEFDRVLRAEVASRGGTYYRYCDDILCVIPFGNEVGVLELVENLISKFGLKINEKKTESIFFREIAGVLVAERPLQYLGFTFDGSRKLIRSAAFAKFSEKYRRGVSLARQTARKYKFTKGVKGVWRRQLYERYSHLGKRNFIRYGLRAAAVMQSRGIRRQLRPLWPRLLKRIEDANSRI

SEQ ID NO: 107 - protein, 429 aa, Janthinobacterium sp.
MKKNGTKYPWFRRRGYPHFDHPISVRDASLIVKDPAEVAKHSFLPFINFSVKTFKAKRHEITKKVHRVAKIRPIAYASHVDSHIYAYYAHNLSKIYEKSINQKGLNNCVLAFRPLGKSNIDFANDAFEKIKASEICYVLALDITGFFDNIDHCLLKKIWSELLEVDKLPSDHWAIFKSLTQFASVHQVTLYELLGISLNNKKSGGPKLCSIQDFRDKVRPAKLINVNKSKKGIPQGSPISTLLSNLYMIDFDVVLKNYADSCGGYYLRYCDDILLIVPPTRKIEAESIAISEIKKLKLDINSKKTDRVDFYFDEHGVFTANKPLQYLGFMYDGKKIILRSASLAKYFDKMKRGVRTAKATMSKRNISRQNRGALEKDLFRKSLYKRYTYLGRRNFISYGFTAARKMNSPAIRKQLRGLWGRLQNEIDKE

SEQ ID NO: 108 - protein, 423 aa, Pandoraea iniqua
MNKRAEWFRRRRYLHFDLPISERAATAIVENPDIVGRHSFYPFVNFVITSAKVKWDAGMKRLVTTPKERSVSYASHVDSHIYAFYASMLDRLYEERLRKLGCQSAVLAFRKLGKSNIHFAKDAFDSIKSIGDADVITADFSDFFGNLDHKIIKSAWCDLIGVKALPKDHYNVFKSITKFCHTDKRNLYAALGISMNNPGAFGARLCTPELFRAVVRGCGLIERNPHPKGIPQGAPISALLSNIYMLQFDMMVWDAVTAAGGRYFRYCDDMIVIVPKGSGKDMLSLVRHLSDIYKLPLHPKKTEERSFVMTSSGLDADKPLQYLGFLFDGKQVILRSASLARYSDRMRRGVRLARLTMRSKNELRTARGETPVPLKKRKLYKRYSYLGRRNFVSYALRAAKILDTRAIKRQVKPLWRRLKQQMA

SEQ ID NO: 109 - protein, 448 aa, Moritella sp.
MNNPPISEEPLWFKKRSYLHFDRPILLDKAKNIVLNSKTVSQHAFYPFISYSFNVAKLSRDKITNKLYRKEKVRDVAYSSHIDSHIYSYYADILSTHYEDKLQDKGLHDSVLAFRKINKKNNIHFANDVFNYIKDKGECTAIALDFSSFFDTLDHGILKQEWSNILGLTALPSDHYNVFRSLTKFSKVDRDEVFDLFNISPHNPKLNGNGKHQRQIKNKRLKICEPHEFRTDVRKAGLISSNKKNYGIPQGSPISALLSNIYMLSFDEKMKDYAASINGTYFRYCDDMLFIVPTSERDEVLVNVKTDISQLHVTINESKTEIRDFKYHVDKLSSFEGNKQKPLQYLGFLFDGSSIFLRSASLSRYSEKMKGGVKLAKNTMDKENRIRKSKGEPLQTELYKRKLHRLYTHRGQRNFLSYGYRAARIMDSKSIKKQLKPLLKRFEEQIAK

SEQ ID NO: 110 - protein, 449 aa, Moritella dasanensis
MNNSPISEVPLWFKKRSYLHFDRPILLDKANNIVLNPKTVSQHAFYPFISYSFNVTKLSRDKITNKLYRKEKVRDVAYSSHIDSHIYAYYADILSAHYEDKLQEKGLHDSVLAFRKINKKNNIHFANDVFNYIKDKGECSAIALDFSSFFDTLDHGILKREWSNILGLKELPSDHYNVFRSLTKFSKVDRDKVFELFNISPHNPKLNGNGKHQSQIKNKRLKICEPHEFRTDIRKAGLISSNKDNYGIPQGSPISALLSNIYMLSFDEKMKDYANSINGTYFRYCDDMLFVVPTSERDKVLVNVTTEISKLYVTINESKTEIRDFRYHSDKLSSFEDNKQKPLQYLGFLFDGSSIFLRSASLSRYSEKMKGGIKLAKNTMDKENRIRKSKGEPLQTELYKRKLHRLYTHRGQRNFLSYGYRAAKIMDSKSIKKQLKPLLKRFEEQIVKE

SEQ ID NO: 111 - protein, 462 aa, Lysinibacillus sp.
MNRSNGPRGLHGLSSSSKIKWSKYRPKKYLHFDKRIDLKHNEHMKANIQDPNWVASYAFLPSIHFKIQFKKYITLKNENGEKIKKKDKKIREIYYAAHKDGFIYKYYGDLLNYAYNDYVSEKGIDNIAVAYRNNKSGKNNIDFAYEVFDFLLKQNQAIVIALDFTSFFDNIDHKSLKQKIKRVLDVEELPKDWYKIYRNITCYSYVERDDLEEFLLDKYGKKKLKKIRSRLLQIMEPAEFRQFKQGKVQVNKKSFGIPQGSGMSAVCSNVHLIDFDKEVLEWAKQKHPDALYRRYCDDLILVIPTTNATVGLLEEWKNELMIQIGRYKDDGLIIQEKKTELRLFREKIIYNEKMEISPLDYLGFVIDKNIIRIREKSLFKYYSRAYKKAKTSKRIAYATSRPGPKRKLYDLYTHLGNKYLGYGNFNAYAKKAHILMKELPFKSHIKKQLKRHWRKIHKRLSD

SEQ ID NO: 112 - protein, 424 aa, Aeromonas hydrophila
MNSENKWFRSRGYLHFDSPVKLRKACKIVKSPLNIAQHAFFPLIKYDIQSLKISIDKDGNVLKKIKTRPISYASHVDSHIYSYYAELLSDLYEKNLSESQLKDSVLAFRSLGKSNIDFANIAFEKIKSYGNCTAIAMDISGFFDNLDHEILKTMWYKLLQENSLPNDHFNIYRSLTKSSVVNRDMLYTALKVSKNNPNTAGLRLCDIKTFREKVRGLELIKTNLTGKGIPQGTSISALLSNIYMLDFDKKIKEIVTSISGEYYRYCDDMLFIVDSDKTSDLISQVTHNITELKIEINDKKTEIRTFHTHRGVQKCDKPLQYLGFIFDGERKLIRSAALARFSGRMKAGVRLAKKTHQKANLIEEKEGLAKTPLFKKKIYERYSHLSKRNFITYGHRAANIMGSHAIRKQLKPLWGRLIKEINEK

SEQ ID NO: 113 - protein, 424 aa, Aeromonas aquatica
MNSENKWFRSRGYLHFDSPVKLRKACQIVKSPLNIAQHAFFPLIKYDIQSLKISIDKDGNVLKKIKTRPISYASHIDSHIYSYYAELLSDLYEKALDKSQLQDSVLAFRTLGKSNIDFANIAFEKIKDHGNCTAIAMDISGFFDNLDHDILKSMWCKLLQKNSLPNDHFNIYRSLTKSSVVNRDLLYTALKISKNNPKAAGLRLCDIKTFREKVRGLELIKTNSTGRGIPQGTSISALLSNIYMLDFDKKIKDIVKSISGEYYRYCDDMLFIIDSDKTSELISLVTQHISELKIEINDKKTEVRTFHTYCGVQKCDKPLQYLGFIYDGERKLIRSAALARFSGRMKAGIRLAKKTHQKANLIEEKEGVAKTPLFKKKIYERYSHLSKRNFITYGHKAANIMGSNAIRKQLKPLWGRLIKEINEK

SEQ ID NO: 114 - protein, 424 aa, Aeromonas bestiarum
MNSENKWFRSRGYLHFDSPVKLRKACQIVKSPLNVAQHAFFPLIKYDIQSLKISIDKDGNVLKKIKTRPISYASHIDSHIYSYYAELLSDLYEKALDKSQLQDSVLAFRTLGKSNIDFANIAFEKIKAHSDCTAIAMDISGFFDNLDHEILKSMWCKLLQKNSLPNDHFNIYRSLTKSSVVNRDLLYTALKISKNNPKAAGLRLCDIKTFREKVRGLELIKTNSTGRGIPQGTSISALLSNIYMLDFDKKIRDIVKSISGEYYRYCDDMLFIIDSDKTSELMSLVTQSISELKIEINDKKTEIRTFHTYRGVQKCDKPLQYLGFIYDGERKLIRSAALARFSGRMKAGVRLAKKTHQKANLIEEKDGVAKTPLFKKKIYERYSHLSKRNFITYGHKAANIMGSNAIRKQLKPLWGRLIKEINEK

SEQ ID NO: 115 - protein, 424 aa, Aeromonas caviae
MNSENQWFRSRGYLHFDSPVKLRKACQIVKSPLNVAHHAFLPLISYDIHSFKISIDKDGNVQKKIKERPISYASHIDSHIYSYYAELLSNVYEKALHELQLKDSVLAFRSLGKSNIDFANTAFEKIKAHGDCTAIAMDISGFFDNLDHVILKSMWCKLLQENSLPDDHFNIYCSLTKSSTVNRDLLYAALKISRNNPKSTGARLCDIKTFRDKIRGLGLIKTNSTGRGIPQGTSISALLSNIYMLDFDKKIKDMVISISGEYYRYCDDMLFIIDSDKTSELISIVTQSISELKIEINDKKTEVRNFHVYRGVQKCDKPLQYLGFIFDGERKLIRSAALARFSGRMKAGVRLAKKTHQKANLIEEKNGVAKTPLFKKKIYERYSHLSKRNFITYGHKAANIMGSNAIKKQLKPLWGRLLKEINEQ

SEQ ID NO: 116 - protein, 503 aa, Rhizobium leguminosarum
MNSRGREHNRKHTVLLPPLARRFLVKPWTPSVPLYPHFDAKIPPAEAERIVKDPQLVATHKFFPFLKYDERWTMFAQKGSRGKSKQRPIRFAARLDSCIFSYYRHQLSEPYEQQLKAADLGTSIIAYRRIPKADGKGGQSNIDFALSAFEAVQRLGNCCAVALDISSFFENLDHAQLQSVWAGLIGQTRLPPDHYKVFQAITRYAFADVKKVYERLGYFGDKEDRHGKVRKGYLRSRQQIPTQLCTGKTFREKIAGEGPLASIIEVNKTDKGVPQGAPLSDLLANAYLLKFDKFVQELCTGFGGTYYRYSDDILIVAPISASDALGLEADIRKVISTHGGGLIIKEEKSAVHQFHTDGARQRVTVVKATDKDGKPAWSKPFEYLGFRYDGRSAFIRDKTMSNLHRKIASICRATAIRLTKRYQGKCTDEIMDMADFERLFQSFGSVQDFHEKSDDYRSWTFTTYAKRAAKTMGPLGTPIGAQLKGLRRAIEDRLRKELSRVGA

SEQ ID NO: 117 - protein, 503 aa, Rhizobium sp.
MNSRGREHNRKHTVLLSPLAQRFVVKPWSPSIRLYPHFDAPITATEAEKFAKSPQRVATHKFFPFLKYDERWTMFAPKGERGKSKDRPIRFAARLDSCIFSYYRYLLSEPYEQKLKAEGLDHSVIAYRHIPKARGESGQSNIDFALSAFRTVQRLGNCCAVALDISSFFENLDHDRLRSVWADLVGQSRLPSDHYKVFEAITRYAFVDVKTAYERLGYFGDKEDRYGNVRKGYLRSRQDIPIQLCNGKQFREKIAGNGSLPSIIEVNKTGKGVPQGAPLSDLLANAYLLEFDKFIRDVCSELGGTYFRYSDDILIVAPISASQAIALEERVRNAISVYGAGLLIKEEKSAIHQFSVTGARQQVNVVKATGKNGKPALNKPFEYLGFRYDGQSAFIRDKTMSNLHRKIASICRATAIRLIKRYQGKSMDEIMALADFEQLYQSFGSVKDFYEKYHDYRSWTFTTYAKRAVKEMGQLGAPITKQLRRLRQSIEERLRKEICRVRA

SEQ ID NO: 118 - protein, 491 aa, Brucella tritici
MPAGVVTSTHSHDEWEPREKDIKHYIHFDRAISPQKIQRIANDRVAVARHPFFPLLRFHEQWTKFRDQKKPKKKKVRPLRYASRLDAAIYARYRCELSEYYEEALAIKGISNVPVAYRRLPKEEGGNKCNIDIAKDVFSFIKKTGKCTVTVVDIKSYFESLDHRRIEAVWADLIGKSLPEDHLAVFKSLTKYSIVDVEKLFARLEMKEKVSVGSRKERRQRRIDALRANGYRQICSPKEFRDIVAGGNGKHPSLIQKNGFDFGIPQGTPISDLIANFYLLDFDKEVNEHVDALGGIYHRYSDDIIVVLPAENVDSFEDMKIFLQDRIRKYGAKIQIQDKKVCIGEFNDIGATLNYSHLFGDASKNGLEYLGFEYDGQRVKIKNSTLSNAWRKLKRKSYGHAWRFVLRYRNKGEVWIRNNYPYLALEKRMLQNVTFNQDNGFESWTFVKYAQRASKAFIGFSPIFSQQTRRYRRLTKTIIQNDLDKAIARYL

SEQ ID NO: 119 - protein, 499 aa, Rhizobium lentis
MPDGVFASSHTEYDAGQSEEHWVPRDKDIKTYIHFDRNVSPHQLARIANSPTEVAKNPFLPLLLFHEEWAKFRRDGARTRKSRPIRFASRRDAAIFARYRAKLSPLYERQLRKRGIEDVPVAYRRLPKAGGGNKCNIEIARDIFSFIKQCDGCYVTVVDIKSYFESLEHSRIKAVWEMLIGRDLPPDHLAVFRAVTKYSVVDIDLLFNRLQMYKKGDGANRTEKRKRKIDVLRTSGFKQICEPTEFRSIVSGKGAGQASLIQKNGFDFGIPQGTPLSDLIANFYLIEFDEEMNSWSKALGGLYRRYSDDIVIILPTGGAPDPMAAKERLQSAIKNYGKQLRIQDKKVAVCEFSSAQTGLSFAHLYGKASRNGLEYLGFEFDGQTVKIKNSTLSNAWRKLKMRAYGDAWRFVKRYRAKGKGWLIANYNRRKIETKLLRDVTFNQDIGYETWTFSKYVNRASKAFIGYKPIFSLQTQRYRRHAKFVIAKSFDKALRRHYSL

SEQ ID NO: 120 - protein, 427 aa, Pseudomonas sp.
MPENWYKFRGYLHFDRPINQAAALEIVSSPKAVAKHAFYPFIRYVAQTQKVFFDKSIGKVVKKDPKQRPISYAAHVDSHIYSYYCDLLNQAYEGHLAKVRWASAILAFRALGKSNIDFARDAFLDIAARKSCCVIAIDIKGFFDNLDHTHLKNAWQAILDTSHLPDDHYAVFRSLTKYSFVYRDQVYEALGLSKNNPKQGRKRICEPHEFRAKVRDGGLIETNRDKKGIPQGSPISALLSNVYMMGFDEQIHAYVQSYGGSYYRYCDDVLLIVPLEKEAEAKALVDLRVNEIGLEIQTAKTEACKFTRSVKGLRSDRPLQYLGFIFDGANIYLRSSSLARYQDRVNRGIWLAGKRMDKVNAKRIARGQLPRSMFLKKLYKRYSYLGRRNFISYGYRAARAMNAPSIKKQLKPHWNRLRERISDAQGE

SEQ ID NO: 121 - protein, 427 aa, Pseudomonas sp.
MPENWYKSRGYLHFDRPINQAAALAIVSSPKTVAMHAFYPFIRYVAQTQKVFFDKSIGKVVKKDPKQRPISYAAHVDSHIYSYYCDLLNQAYEDHLAQVPRSSAVLAFRALKKSNIDFALDAFLDIAVRESCCVIAIDIKGFFDNLDHAHLKSAWQALLGTSHLPNDHYAVYRSLTKYSFVYRDQVYEALGLSKNNPKHGRKRICEPHEFRAQVRDGGLVETNKGKKGIPQGSPISAMLSNVYMMGFDEQIHTYVESCGGAYYRYCDDVLLIVPLEKEAEAKALVDLRVNEIGLEIQTAKTETCKFTRSAKGLRTDRPLQYLGFIFDGANIYLRSSSLARYQDRVNRGIWLAGKCMDKVNAKRIARGQLPRSMFLKKLYKRYSYLGRRNFISYGYRAARIMGSPSIKKQLKPHWNRLRERISDAQGE

SEQ ID NO: 122 - protein, 427 aa, Pseudomonas sp.
MPENWYKSRGYLHFDRPINQAAALDIVLSAKTVSKHAFYPFIRYITKTQKVFFDKGLGRVTKKDLKERPISYAAHVDSHIYSYYCELLNQAYEDHLAKVPWSSAILAFRALKKSNIDFARDAFLDIAVRDSCCVIAIDIKGFFDNLDHAQLKNAWQALLDTSQLPDDHYAVYRSLTKYAFVYRDQVYEALGLSKNNPKRGRKRICEPHEFRARVRDGGLIETNKDKKGIPQGSPISAMLSNVYMMGFDEQIHDYVESCGGSYYRYCDDVMLTVPLEKEAEAKTLVDLCVNEIGLEIQAAKTETCKFTRSAKGLRSDRPLQYLGFIFDGTNIYLRSSSLARYQDRVNRGIWLAGKGMDKVNAKRISKGQLPRSMFLKKLYKQYSYLGRRNFISYGFRAARIMDSPSIRKQLKPHWNRLRERISDAQGE

SEQ ID NO: 123 - protein, 427 aa, Pseudomonas corrugata
MPENWYKSRGYLHFDRPINQAAALEIVSIPKTVSKHAFYPFIRYITKTQKVFFDKGLGKVAKKDPKQRSISYAAHVDSHIYSYYCELLNQAYEDHLVKVPWSSSILAFRALGKSNIDFARDAFLDIAVRDFCCVIAIDIKGFFDNLDHSHLKSAWQALLDTSRLPDDHYAVYRSITKYSFVYRDQVYEALGLSKNNPKHGRKRICEPHEFRAKVRDGGLIENNKDKKGIPQGSPISAMLSNVYMMGFDEYIHAYVKSCGGSYYRYCDDVLLIVPLEKEAEAKALVNLRVNEIGLEIQTAKTEICKFTRSAKGLRSDRPLQYLGFIFDGTNIYLRSSSLARYQDRVKRGVWLAGKCMDKVNAKRISKEQLPRSMFLKKLYKQYSYLGRRNFISYGYRAARIMDSPSIKKQLKPHWNRLCERISDAQDE

SEQ ID NO: 124 - protein, 429 aa, Pseudomonas sp.
MPENWYKSRGYLHFDRPINQAAALEIVSSPKTVAKHAFYPFIRYVAQTQKVFFDKSIGKVVKKDPKERPISYAAHVDSHIYSYYCELLNQAYEDHLAKVQWSPAILAFRALGKSNINFAREAFLDIATRDSCCVIAIDIKGFFDNLDHAHLKSAWQTLLGTSQLSDDHYAVYRSLTKFSFVYRDQVYEKLGLSKNTSKQGRKRICEPHEFRTKVRDGGLIETNKDKKGIPQGSPISALLSNVYMMGFDEQIHTYLQTCGGAYYRYCDDVLLIVPLEKEAEAKALVDQRVNAIGLEIQASKTETCKFKLSAKGLRSDRPLQYLGFIFDGTNIYLRSSSLARYQDRVRKGIWMAEQCMDKVNAKRISRGQLPRSMFLKKLYKRYSYLGRRNFISYGYRAARIMNAPSIKKQLKPHWNRLRERISDAQGERH

SEQ ID NO: 125 - protein, 427 aa, Stutzerimonas stutzeri
MPENWYKSRGYLHFDRPINQAAALEIVSSPKTVAKHAFYPFIRYVAQTQKVFFDKSIGKVVKKDPKQRPISYAAHVDSHIYSYYCDLLNQAYEGHLAKVRWASAILAFRALGKSNIDFARDAFLDIAARKSCCVIAIDIKGFFDNLDHTHLKNAWQAILDTSHLPDDHYAVFRSLTKYSFVYRDQVYEALGLSKNNPKQGRKRICEPHEFRAKVRDGGLIETNRDKKGIPQGSPISALLSNVYMMGFDEQIHAYVQSYGGSYYRYCDDVLLIVPLEKEAEAKALVDLRVNEIGLEIQTAKTETCKFTRSVKGLRSDRPLQYLGFIFDGANIYLRSSSLARYQDRVNRGIWLAGKCMDKVNAKRIARGQLPRSMFLKKLYKRYSYLGRRNFISYGYRAARAMNAPSIKRQLKPHWNRLRERISDAQGE

SEQ ID NO: 126 - protein, 394 aa, Stutzerimonas stutzeri
MPENWYKSRGYLHFDRPINQAAALEIVSSPKTVAKHAFYPFIRYVAQTQKVFFDKSIGKVVKKDPKQRPISYAAHVDSHIYSYYCELLNRAYEDHLAKVQWSSAILAFRALGKSNIDFARDAFLDIATRDSCCVIAIDIKGFFDNLDHVHLKNAWQALLGSSQLPDDHYAVYRSLTKFSFVYRDQVYEALGLSKSNPKQGRKRICEPHEFRAKVREGGLIETNKDKKGIPQGSPISAMLSNVYMMGFDEQIHAHVESCGGAYYRYCDDVLLIVPLEKEAEAKALVDLRVNEIGLEIQAAKTETCKFTRSAKGLRSDRPLQYLGFIFDGANIYLRSSSLARYQDRVHRGIWLAEKCMDKVNAKRISRGQLPRSMFLKKLYKRYSYLLTWQINRAY

SEQ ID NO: 127 - protein, 427 aa, Stutzerimonas nitrititolerans
MPENWYKSRGYLHFDRPINQAAALEIVSSPKTVAKHAFYPFIRYVAQTQKVFFDKSIGKVVKKDPKQRPISYAAHVDSHIYSYYCQLLNRAYEDHLAKVQWSSAILAFRALGKSNIDFARDAFLDIAARDSCCVIAIDIKGFFDNLDHAHLKNAWQALLGSSQLPDDHYAVYRSLTKFSFVYRDQVYEALGLSKSNPKQGRKRICEPHEFRVKVREGGLIETNKDKKGIPQGSPISAMLSNVYMMGFDEQIHAHVESCGGAYYRYCDDVLLIVPLEKEAEAKALVDLRVNEIGLEIQAAKTETCKFTRSAKGLRSDRPLQYLGFTFDGANIYLRSSSLARYQDRVHRGIWLAEKCMDKVNAKRTSRGQLPRSMFLKKLYKRYSYLGRRNFISYGYRAARIMNAPSIKKQLKPHWNRLRERIADAQGE

SEQ ID NO: 128 - protein, 427 aa, Pseudomonas migulae
MPENWYKSRGYLHFDRPINQVAALEIVSSPKTVARHAFYPFIRYVAQTQKVFFDKSIGKVVKKDPKQRPISYAAHVDSHIYSYYCDLLNQAYEDRLAKVQWASAILAFRALGKSNIDFARDAFLDIATRKSCCVIAIDIKGFFDNLDHTHLKNAWQALLGTSRLPDDHYAVFRSLTKYSFVYRDQVYETLGLSKSNPKHGRKRICEPHEFRAKVRDGDLMETNKDKKGIPQGSPISALLSNVYMMGFDEQIHAYVESCGGAYYRYCDDVLLIVPLEKEAEAKALVDLRVNTIGLEIQAAKTETCKFTRSAKGFRSDRPLQYLGFIFDGAKIYLRSSSLARYQDRVNRGIWLAGKCMDKVNAKRIARGQLPRSMFLKKLYQQYSYLGRRNFISYGYRAARIMNSPSIKKQLKPHWNRLRERISDVQGE

SEQ ID NO: 129 - protein, 233 aa, Pseudomonas campi
MPIKDDTWFKTRTYLHFDPPTSKKTAFSIISSPSKVSSHSYYPLIRFTISTQKIRFNKAESKVERKPPKDREISYAAHLDSHIYSYYCQILDELYEQTLKESDLDDVVLAFRKKGKSNINFAHDAFNEISLRKNCCAIGLDITGFFNNLDHQILKNSWRDLLNLKALPADHYSIYKSLTKFSFVNRDDLYNALKIPSTNPKNGRTRVCTPEEFRVLVRGNGLITINHESPQLS

SEQ ID NO: 130 - protein, 591 aa, Paracoccus sp.
MPKDWHPHIRRMAPNWGCFSHVFKLSRPVSQPVQDASSIIRAPLASHAGGFAAIRQYHIASCFTVYTTTSKTNAHRRTAGAEMLRVGALTRCSCPLSRRPMEDEFDFTAKDLKHYPHFDAPITLKEIRALVTDPARVAANSFYPFFLYEESWQPYRSTDAAKPDKKTRPIRYGARRDAYVFAFYRRKLSRLYETRLRDLGIEDCPIAYRQVLKPGRGGGKCNIDFAKDAFDEIDRLGDCVAVALDIKGYFENLDHGRIKRTWCDLLGVDKLPPDHYAVFKNITKYSYVDQRSVYSRLGYFGMRERNGHMVPGFLIPFRDMPKQLCSNSDFRAKICGGDPKIGPSLVQKNFLPHGVPQGAPISDLIANFYMLEFDAVLAEYARARGGRYMRYSDDILLILPGGSPEARAAIDFATAEMRNHGPELRIKDAKTCVAQFQRAPGGLLFHHLKQRPDEAAKNGFEYLGFRYDGRRVYVRDSTISRFYSKVAGAAKRDGRRHVEENPTMDAGRLIGSFDYPLFSQRFSKVKKANLTSDYRSWTFYSYLKRSAEAFGPKGDRILRQARGFDDFMKDRVRLAIVSCVAKRKPPVPETT

SEQ ID NO: 131 - protein, 491 aa, Brucella intermedia
MPTGVVAPTHSHEEWELRDKDIKRYIHFDRAISPQKIQKIATDRVAVARHPFFPLLRFHEQWTKFRDQKKPKKKKVRPLRYASRLDAAIYARYRHELSKYYERALAIKGISDIPVAYRRLPKERGGNKCNIDIAKDVFYFIRKIGNCIVTVVDIKSYFESLDHRRIEAVWADLIGKSLPEDHLAVFKSLTKYSIVDVQKLFARLEMKEKVSVGTRKERRQRRIDALRANGYRQICSPKEFRDVVAGGNGKHPSLIQKNGFDFGIPQGTPISDLIANFYLLDFDKEVNEHVEALGGIYRRYSDDIIVVLPTENVGSFEEMKNFLQLRIRKYGAKLQIQDKKVCIGEFTDAGATITYRHLFGSASKNGLEYLGFEYDGQRVKIKSSTLSNAWRKLKRKSYGHAWRFVSRYRNKGEVWMRTNYPYTFLEKRMLQNVTFNQDNGFESWTFVKYAQRASKAFIGFAPIFSQQTRRYRRLTKTIIENDLNKAIARYL

SEQ ID NO: 132 - protein, 426 aa, Diaphorobacter sp.
MPYPTWFRQRRYLHFDEPMGLEKARELVEDPVAVSKHAFWPLISYQIETSKIKEDAATGKLVSHPKVRPIAYAAHSDSHIFSYYCQQIGVAYEAALGRHDIADVVLAFRSLGKNNIDFARQAFDEIRLLGDCVAVAFDISGFFDHLDHTLLKQRWKEVLGVAELRSDHYAVFKALTKSAVVNRDELFKATGVSMSNPRSGGRRRLCEPEDFRRKVRAAGLVSSNPNGFGVPQGTAISALLSNVYMLNFDVAAKQFAASRGGKYMRYCDDMLFIMPGKDHADVESFAVAEICKLKLSLNSSKTDVCVFTKVSGGSRQTVSRPLQYLGFLFDGERVLIRSAAFAKFSNRMRRGVSLAKQTMRSRNAMRAQAGIPERDLFLKKIYTRYSHLGGRNFLRYGYKASEIMESSGIRRQLRPLWGRLQEVINR

SEQ ID NO: 133 - protein, 490 aa, Rhodobacter capsulatus
MQDEFDFTTKDLKHYPHFDAPLSLREIRRLVTSPERVAANSFYPFFLYEESWQPYRSADAAKPDKKTRPIRYGARRDAYIFAFYRRKLSRLYEARLRTLGIEDCPIAYRQVSKSGLGGGKCNIDFAKDAFDEIDRLGDCVAVALDIKGYFENLDHRRIKQIWCDLLGVAELPPDHYAVFKNITKYHFVDQRTTYRRLGYFGLRERNGEMIDGFLRPYRDMPKQLCSNADFRAKICGGDPAYPSIIKKNDKPHGVPQGAPISDLIANFYLLEFDVVMAAYARARGGRYMRYSDDILLILPGGASEASAAVAFATAEMLNHGPELRIKDSKTCVAQFERVAGALRFQHLAQRPDEPAKNGFEYLGFRYDGRCVYVRDSTISRFFGKVAGAAKRDGRRHVEANPAMDAGDLIRAFDFSLFSQRFSRVKKEKLTDDYRSWTFYSYLKRSAEAFGPKGDRILKQARGFDDFMKARVSGAIVTAAAKRKAPAKTAA

SEQ ID NO: 134 - protein, 483 aa, unidentified
MQKPFTPADIKHYPHFDRHLTPDQINELVRDSARVASNKFYPFFLYYETWQPFRTKKDSNGKTIKPPIKSRPIRYAARKDAYILTHYRRILSEKYEVRLCEMGIEECPIAYRKIPKSTGGGKSNIEFAKDAFDAIDAMGDCIAIALDIKGFFENLDHDRIKSVWCDLLGVERLPEDHFTVFKNVTRYRVVDQKEVYRRLGIIAKGQDGIEQYTVPYSDMPTQLCSPKEFRDKICGGDPNLPSIIVKNDDPFGIPQGAPISDLIANFYLMDFDKSLSDFAAEFGGTYMRYSDDILLILPFSEGIADKAEQFAIAEIRNYGNQLKIKPSKTCVVQFKRLDDGLSFQHVKGPQGKNGFEYLGFRYDGRKVYIRDSTISRLYRKVSRTAKGIANGFSNGHPDMSVEEIMSKFNYSNFSQRFNRVDEQNLSPDDFNTWTFYSYLKRASEAFGEKGSPIIPQARKFRSFMKSRLNEAMKSAVIKRDNRS

SEQ ID NO: 135 - protein, 430 aa, Janthinobacterium sp.
MQKPKHPWFRRRGYPHFDHPISFREAKRIVKNPLQVAQHSFYPFVEFTINTFKVKRNKITDKVERVEKIRPIAYASHVDCHIYSYYSFILSKIYESWIRSSGLNECILAFRSKGKSNVEFAKDAFDAIKKMGNCHVVALDITGFFDNLDHKILKLEWANLIDERNLPADHYAVFKSLTKFATVNQIKLYESLGISSNNKKSNPKRLCTPLEFRTVIRSKEKIVKNNKGSKKGIPQGSPISALLSNIYMRQFDKVLYSFANSCAGHYFRYCDDILLVVPTEKSSYVETLAINEISKLNLVINPTKTDRVGFQINSTGELCSTKPLQYLGFLFDGEKIILRSASLARYSEKMKKGIKIAKATMLKRNLARIARGEDEKPLFRHKINKRYSHFGRRNFISYGYSAARKMDSNAIRKQLRRLTKRMINEIDRKK

SEQ ID NO: 136 - protein, 326 aa, Aeromonas dhakensis
MQLKESVLAFRSLGKSNIDFANTAFEKIKAHGDCTAIAMDISGFFDNLDHVILKSMWCKLLQENSLPSDHFNIYRSLTKSSTVNRDLLYAALKISRNNPKSTGARLCDIKTFRDKIRGLGLIKTNSTGKGIPQGTSISALLSNIYMLDFDKKIKDIVVSISGEYYRYCDDMLFIIDSDKTSELISIVTKSISELKIEINDKKTEVRNFHVYSGVQKCDKPLQYLGFIFDGERKLIRSAALARFSGRMKAGVRLAKKTHQKANLIEEKNGVAKTPLFKKKIYERYSHLSKRNFITYGHKAANIMGSNAIKKQLKPLWGRLLKEMNEQ

SEQ ID NO: 137 - protein, 396 aa, Duganella sacchari
MQTTREPWFRRRGYLHFDRPVGQAAALTIVSDPVRVAQRSFFPFLDFDILSTKVKWDDDLKQLVRKRKERKVAYASHIDSHIYSYYCQLLSARYEQELTRRGLGDCVLAFRSLGKSNIHFAAEGFAEVSRRSNCFVLGLDIRGFFDTLDHKILKSAWMSVLGVAQLSPDHYAVYKAITRFSMVNLDSVLELLGVSKNNPRKGRNRLCTPEDFRDKVRPSGMIRANSTGKGIPQGSSISALLSNIYMLEFDCFINEYVAGLGGKYFRYCDDMLFVLPLAAKPTCEAVIKDAISKCKLEIQDAKTERRDFVTRGGRLVTDKPLQYLGFLFDGERIYLRSASLARYSDRLTRGVHLAKATMRKRNRARVARGEDPRPLFTAPLAGQIPPPLATPNSPTL

SEQ ID NO: 138 - protein, 433 aa, Halomonas maura
MRREDACWFRKRNYLHFDSPIGFAKAEQLVTNPQKVSQHSFYPLISYSIDSVKISKDKATKNIQKKPKKRPISYPSHKDGHIYSYYSKIIAQRYEEEIKKAQISESVLAFRQLGKSNIDFAKEAFDTIKRMGDCSVVALDITAFFDTLDHKILKEKWSKTLGINSLPEDHYSIYKSITKFSIVSKERLYEELGISKNNPKKNRHRLCSPSEFREKVRKKVLVKTNKTGKGIPQGTPISALLSNIYMIDFDTLMQEAVSEQGGKYFRYCDDMLFITPVQCRDEVAGFVQSEINKLELSIQPTKTERRTFITTPTGQQSDKPLQYLGFTFDGERILIRSSSLSRYSRKVKGGVKLAKSTMKKRNKERIDKGMPEESIYKKKLYERYSHLGKTNFITYGHRAASKMNSIHIRRQLKPLWKRLQEEIEKKEKQRPKS

SEQ ID NO: 139 - protein, 425 aa, Desulfurivibrio alkaliphilus
MRSQDHPWYKSRGYIHFDLPIGVRQAEAIATSPKRVKRHSFYPFIAYEIKSKKVRKGEDGKSLAIKEKKRPVSYASHVDSHIYTYYTYMLNEAYEKFIKDIGVEENVMAFRKLGKSNIDFANDAFNKIIERQFCAAIAFDIEGFFDNLNHSILKESWSRVLGLKKLPDDHYNVFKSLTKFSKVYKDPLYEAFAISKNNPKKKNKRVCEPRDFRKVVRKNGLVEVNNTQKGIPQGSPISALLSNIYMVEFDQIVSSVMGEINGCYLRYCDDILCIVPLARKNEIIDRINKEIKKLNLNINTDKTKTSEYRVVKGQLTCDKPLQYLGFVFDGHHKLIRSAALARFSERMKSGVRLAKLTRIKYNRVRIRKGQPRQDVYKRKIYERYSHLGQRNFIRYGLRCAETMGSSAIKKQLKPFWARLQEEIEK

SEQ ID NO: 140 - protein, 397 aa, Vibrio nereis
MSAKSPTWYRSRGYLHFDLPISSVKAKRLVTNPELVAKHAFFPLINYSVESKKISKDKASSRIDVTYKERPIAYSSHVDSHIYAYYAELLSVKYESKLKELELSECVLAFRGLGKSNIDFAHEAFEQIKNMGECSAVALDFSKFFDTLDHELLKKSWAAILDTNKLPNDHFNVFKSITKFSKVNKVDLYNEFSISNNNPKKGRNRVCSSKEFRDVVRAKKLIKTNQDSFGIPQGSPISALLSNIYMLEFDAEMNRYVKMYGGKYYRYCDDMLFIVPTGQKKKVAGYAQKKVKGLKVSINPKKTELRTFTKQGNILVADQMLQYLGFMFDGENAYIRSSSLALYSEKMKRGIRLAKKTMVKYNAIRQSKGLDERPLYKRKLYSRYTHLGGRNFITYGL

SEQ ID NO: 141 - protein, 324 aa, Azospirillum brasilense
MSDPVWYRKKRYAHFDVPLSADNATAYVTNPERVAKRSFYPFIAFDITVRRYKSKNGTTEIKNKKRPIRMASHVDGYVFAYYAWMLSRRYEGFIENTPLRKCVLAYRSGIGSNITFAKEAFWEVDRRGSCVAIAMDLEKFFDSLDHEHLKRQWCQVLGTNRLPPDHYAVFKAMTRYARVDREAAYATLGIKDAPPKPLCTPSEFRTKIRAGRLIQVNTDKFGIPQGSPMSSVLSNIYMIPFDQEMVALAYGLHGYYRRYCDDILWIVEDGDQETVQRAVEIALRKIGSEVNVNREKTIVSKFDFHGLTADGKPLQYLGFTYDGH

SEQ ID NO: 142 - protein, 423 aa, Burkholderia sp.
MSEPAEWFKRRRYLHFDLPISEPAAVAITGNPTVVARHAFYPFIRFTVKSRKVKWDKLSKRLMTSEKERPVSYASHVDSHIYAFYASILSQHYEDYLKEVGYQSSVLAFRKLGKSNIEFAKDAFDAIKKMEGADVIAADISDFFGSLNHQILKASWAKILKTKELPSDHYNVFKSLTRFTWVDKNYLYKCLGISIHNPRGFGARICEPEIFRTVVRKLGLIQRNATDRGIPQGSPISALLSNIYMTDFDQAMWTSVASIGGQYFRYCDDMLIIAPEGKGKEFMQLARELADLYALPLHPKKTEERFFTSSSGKLLADKPLQYLGFIFDGQQVSLRSASLARYSERMRRGIRLARVTMQARNTLRVERGESPRPLYKGKLYRRYSYLGRRNFVSYAIRAANILDEKAIKRQVKPLWKRLRNQMK

SEQ ID NO: 143 - protein, 423 aa, Burkholderia cepacia
MSESVEWFKRRRYLHFDLPTSESAAVAITSNPSVVERHAFYPFIQFTVTSRKVKWDKSAKRLVTIEKERPVSYASHVDSHIYAYYASILSEHYENYLKDVGYQASVLAFRKLGKSNIEFAKDAFDAIKEMSGADVIAADISDFFGSLNHKILKASWAKILKAKELPSDHYNVFKSLTRFTWVNKNNLYKCLGISIYNPRGSGARICEPEIFRTVVRKLGLIQRNATDKGIPQGSPISALLSNIYMTDFDQAMWTSVASMGGKYFRYCDDMLIIAPEGKGKEFMQLARELADLHALPLHPKKTEERFFTSSSGKLLADKPLQYLGFIFDGQQVSLRSASLARYSERMRRGVRLARVTMQARNTLRVERGESPRPLYKGKLYRRYSYLGRRNFVSYAMRAANILDEKTIKRQVKPLWKRLRNQMK

SEQ ID NO: 144 - protein, 429 aa, Paraglaciecola sp.
MSIENLNDWYKERHYLHFDPPIGKRKAISIATNPEAVAKHAFYPLINFEVTKIKVRSDDNGKLIKHKKPRPIAYAAHSDAAIYSYYAQLLSKEYEVKVAELNLDDNVLAFRSKGKSNIHFANDAFEAINQVGPCTAIGYDVSKFFDTLDHGVLKSQWQTLLGVKTLPDDHYKVFKSLTKFTQVDKCKLFGSLGLSIHNPKVQNKRLCTAEQFRKYVRENNLISKNPRPNKGIPQGTPISALLSNIYMLDFDQRVKEALEGQGGVYFRYCDDMLFIIPDAAKQFVSSIDQFVTDAIESLKIEINHGKTEKRQFVLKGSELFSNKPLQYLGFLFDGKRKMLRSAGLAKYSERMKKAVKLAKRTQKVRNEKRVKRGLLPTQLYKKKLYSKHSYLGRRNFITYAHCAAEVMGSNSIRKQIKPLWKRLQAEIKH

SEQ ID NO: 145 - protein, 423 aa, Burkholderia sp.
MSKAVGWFKRRRYLHFDLPISENAAAAIACNPEVVTRHAFYPFIRFIVKSHKVKWDKVHKRLVVIPKERPVSYASHVDSHIYAHYASLLSERYEEYLREVEYQPSVLAFRRLGKSNIEFAKEAFDAIKLMGGADVICADISDFFGNLDHKILKASWATMLGGKNLPPDHYNVFKSLTRFTWVDKRNLYKVLGISFNNPRRAGARICEPDVFRNVVRACGLIERNVVPKGIPQGSPISALLSNIYMTGFDQAMWTALSPSGGKYFRYCDDMLIIAPEGKGKEFMKLAGELASLYELPLHPKKTEERFFTSTSGRLEADRPLQYLGFIFDGQQVSLRSASLARYSERMRRGVRLARVTMRTRNDLREERGEAARPLYKGKLYRRYSYLGRRNFVSYALRASNILGEKTIKRQVKPLWKRLRKQME

SEQ ID NO: 146 - protein, 421 aa, Idiomarina ramblicola
MSKDEPAWYKKRGYLHFDAPIGAARAIKLVRNTKAVSKHAFYPLLRYEVISKKLKRNSDGKLKPEPKIRPISYAAHADSQIYSFYANQLAEAYERKLASLELSECVLAFRKLRKSNIEFARDAFTEISNMGRCSAVAIDISKFFDTLNHQHLKKSWCDVLGEETLPNDHYAVYKSLTKFSFCNRDAVYKAFQVSPSNPWNGRQRICESAEFRKRVRDSGLITTNKDTFGIPQGTPISALLSNIYMIDFDQQMKALAKECGGSYRRYCDDMLFIIKRGCEARVESQAECELKKLGVAINPKKTEVRQFWRYGGVQKANAPLQYLGFTFDGQRILLRSAALAKFSGRMNKAIRLVSRTLNSQLEKDEKARLRKKKLYERYSHLGNRNFIRYGLRAADKMQSKAIKRQLKPLWGKLNKKLDDFS

SEQ ID NO: 147 - protein, 423 aa, Paraburkholderia fungorum
MSKLPEWYRRRRYLHFDLPINEKAAAVIACNPEIVTRHAFYPFIRFTVKSHKIKWDKVHKRLVATPKERPVSYASHVDSHIYAFYASQLSARYEEYLREVEYQPSVLAFRKLGKSNIEFAKEAFDAIKLMGGADVVCADISDFFGNLDHKILKASWAAILGVKDLPPDHYNVFKSLTRFSWVDKRNLYKTLGISFNNPRRSGARICEPDVFRNVVRGCGLIERNLLAKGIPQGSPISALLSNIYMTGFDQAMWTAAAASGGKYFRYCDDMLIIAPEGKGKEFMMLANELADLYRLPLHPKKTEERFFTSASGKLKADKPLQYLGFIFDGQQVSLRSASLARYSERMRRGVRLARVTMRTRNDLRVARGEAATPLYKGKLYRRYSYLGRRNFVSYALRASNILGEKTIKRQVKPLWKRLRKQMG

SEQ ID NO: 148 - protein, 369 aa, Pseudomonas savastanoi
MSNAWYKSRRYLHFDRPVNEDAALKVVSDQRAVARHSFYPLIRYVAESQKVHFDKAAGRVVKKDPKKRQISYAAHLDSHIYSYYCEALSDLYERYLSTTEWSASVLAFRTLGKSNIEFAYEAFMDIASRTECCAVGIDIKGFFDNLSHTHLKSSWQKLIDRPSLPDDHFAVYKSLTKFSFVDREEVYSALGISKNNPKNGRQRICEPHQFRSAIRGAGLIETNSIGKGIPQGSPISALLSNIYMMDFDEKLYSYVETHGGSYFRYCDDILLIVPLAKEAEAIQFVDDEVAAIKLEVQKTKTEICRFKKTAKGCRSDRALQYLGFIFDGENIYLRSSSLARYQERVNRGLSIATLSMQKVNTARIAREGL

SEQ ID NO: 149 - protein, 425 aa, Pseudomonas amygdali
MSNAWYKSRRYLHFDRPVNEDAALKVVSDQRAVARHSFYPLIRYVAESQKVHFDKAAGRVVKKDPKKRQISYAAHLDSHIYSYYCEVLSDLYERYLSTTEWSASVLAFRTLGKSNIEFAYEAFMDIASRTECCVVGIDIKGFFDNLSHTRLKSSWQKLIDRPSLPDDHFAVYKSLTRFSFVDREEVYSALGISKNNPKNGRQRICEPHQFRSAIRGAGLVETNSIGKGIPQGSPISALLSNIYMMDFDEKLYSYVETHGGSYFRYCDDILLIVPLAKEAEAIQFVDDEVAAIKLEVQKTKTEVCRFKKTAKGFRSDRALQYLGFIFDGENIYLRSSSLARYQERVNRGLSIATLSMQKVNTARIARGQLPRSIFLRKLHSRYSYLGRRNFISYGYRAARIMNSKSIRKQLKPLWGRLRKKIEDIA

SEQ ID NO: 150 - protein, 427 aa, Photobacterium leiognathi
MSSNKPLWYRSRGYLHFDLPVSFKKAKNLVTNPELVSKHAFFPLINYAVESKKISKNKDTRKIDVAVKERPIAYSSHMDSHIYAFYANLLSKKYEAKLKSAGLTESILAFRGLGKSNIDFAFEAFEQIKIMGECSAVALDFSKFFDTLDHDLLKQSWANLLGEKNLPLDHFNVFKSITKFSKVNKVELYKEFGISPNNPKNGRNRVCTAQEFRDVVRKKKLIKTNKDPFGIPQGSPISALLSNIYMFEFDAEMKRYMDIHGGKYYRYCDDMLFIVPAPLREKVAGYAQEQVKKLKVSINPKKTELRTFSSQGDILVADQMLQYLGFMFDGENVYIRSSSLARYSEKMKRGIRLAKKTMDKYNAVRANKGLPEKALYKRKLYSRYTHLGGRNFVTYGLRAASTMQSKTIKRQLKPLWRRFHEELERET

SEQ ID NO: 151 - protein, 442 aa, Neisseria subflava
MSTSNPSWYKCRGYLHFDSPINSRQAISLVTSPKKVVTHSFYPFLSCTLSMPKVKKENGELKRGAKEREIAYASHKDSHIFSYYTHILNEKYENLIENKYSSINNSVLAFRKLGKSNIEFAKYAFDYILKHKNCSVIALDISNFFGNIDHNILKAKWKKIISNGTLPPDHFAVFKAITQYSIIKKEIAFKEFGISIHTPRSNSRKQICSPEEFRKFRDKFNDTLFKGNQVIYSNKGMGKGIPQGSPISALLSNIYMIDFDIIVQDIIQEKNGLYMRYCDDILCIIPSDELEIIRTFIKNEIKKLKLDINEKKTEIVNFKFDQEKNKITNDKKLQYLGFIIKDESITIRPAAFTKYSKKMKRGVSLAKQTQRKYNKIRELNGKEKKKIFKHKLFVTYSHLGKRNFVSYGKRAARIMQSKQIRKQLKPLFNRLKARIKDSDTLE

SEQ ID NO: 152 - protein, 437 aa, Sulfitobacter sabulilitoris
MTDDFSLTNSDLKHYPHFDAPISLKEIERLVTDEQRVASNKFYPFFLYHEEWQPYRSANAVKPEKKSRPIRYGARRDAYIFAHYRRKLSAPYEQRLADMGISDCPIAYRQIPKPGTNGGKCNIDFAKDAFDEVDRLGDCVAVALDIKGYFENLSHSRIKAIWCDLLGADELPADHYAVFKNITKYRFVDQRSVYRRLGYLGLIQRGKHTIEGFTVPYREMPKQLCSPDDFRAKICGGDPTKPSLVQKNALPHGVPQGAPISDLIANFYLIDFDAKLDQYARERGGKYMRYSDDILLIIPGGDTEAAAATSFATDEIKNHGEALEIKAAKTCVVRFTRSGEDLSFEHLTGSQGKNGLEYLGFRYDGRKVYVRESTISRLYRKVSVAAKRDGTMHVLSNPSADSATLIGSFNYSLFSQKFSRVKKGELTDDYKSWTFYS

SEQ ID NO: 153 - protein, 471 aa, Brevundimonas huaxiensis
MTGRTIVRQDVNTVAGESRNIIVTAAGGRDGLNGTHPRRVTTKPLKARRYPHFDDPLDDNALGTFERSEAEVAAHPFFPLLAYQKTRRTVDFSVFPPEVKTKPRDIKYAAHADAALYGIYARKLAVPYEDALRHRGISDSVLAYRSGVGYNVPFAGALFDEIRQCGGGTVICVDVSKFFDRLRHDLLKARLGDIIGSSRLPPDWHAVYRRMTAFDSVEIEALKAKLGRLGGGRICDIDAFRRDVRPIIKRNPNPYGIPQGTPLSGGFANLYMIDVDQFMHTWVSGRGGSYRRYSDDIAIRMPSPVAASAAIDILQEQLTSVGLEMNDDKTCVSTFVQKDGQLVCVGSPLQYLGFTFDGSKTLIRSESMRVFYARMKSNIRRYVRAAARDKIPVTQLRRRVLIGRFTHWGDAWNFVQYAYRASRELGAPEIKRQLRNHVPVFEEHWKAMTQRYYKGALPPAPAGPSRADLKS

SEQ ID NO: 154 - protein, 442 aa, Vibrio toranzoniae
MTHKKSSQWYTKRNYLHFDQSVSEVKAQRIVMNKKVVSTHAFFPFISYTFNTSKLARDVATDKLYQKPKPRSVAYSSHIDSHIYAYYAQLLSERYEEALKQKGLEENVLAFRKIDGKSNIHFANDAFNDIRLFGTGHSAVALDFSKFFNTLDHQLLKQSWCEVLKVSQLPSDHYNVFRSLTKYSEADRNALFSMFDISPYNPKAQDSQGKKRKQICLISDFRSKVRKNGLIQTNRSGEGIPQGSPISALLSNIYMLSFDEKMRDFVACHGGKYYRYCDDMLFIVPTSIRSDVEQFAIQEIGSLKVQINKDKTEIRDFKLSDNVLTSFDEHGQKKTLQYLGFLFDGNSIYLRSTALARYSEKMKGGVKLAKDTRDKENRIRKTKGEPKQDRLYRKKLHRLYSYRGKRNFLSYGYRAAKIMDNSSSIKKQLKPLWGRLQEEIAK

SEQ ID NO: 155 - protein, 488 aa, Rhizobium glycinendophyticum
MTIKAHGHLAPSRSSDSGEWAFKPKMYPHFDSFIAETEARALASDPVRVAAHTFYPFILYHQRWTKFAAKGTKGKVKERPIRFAARADAYIFSYYRHLLSVPFEAKLKELNLEDCVLAYRRIVNPGGGGKCNIHFALDAVNAIRKLGNCSAIALDVSSFFESIDHGMLRARWCDLLKVDRLPPDHYAVFKAMTQYSVIDREMLYERLGFWGEKHVSRDGTPIKGFLVEEAEIPLQLCNGTEFRQKIAGGNGHRSLIQVHRKPYGIPQGSPISDLLANFYLMEFDSAVASKVRELGGTYFRYSDDILIIAPIEADAATDLEAWVRQEIVRHGPKLQIKAEKSAVFQYWGTGGNQTWTRVMGEQGKNGIEYLGFRYDGESIFLRDSTLSGLQRKASLSAKRLAHALVHRYPTKSSSDILADINLSSFLQRYGRVHDFESKADNVKNWTFWTYATKAASITAPLGLPIFKQLRNYRRNMRNHVKRALEKKA

SEQ ID NO: 156 - protein, 500 aa, Rhizobium ruizarguesonis
MTIRAHGHLAPSRSSDLGGWAFRPKMYPHFDSFLTETEARALASDPARVAAHSFYPFILYHQRWTKFTAKGTKGKVKERPIRFAARADAYIFSYYRHLLSAPFEARLKELDLGDSVLAYRRIANPGGGGKCNIHFALDAVNAIRKLGNCSAIALDISSFFESLDHEMLRARWCDLLKVSRLPPDHYAVFKAMTRYSVIDREGLYERLGFWGQKHVSRDGVPIKGFLVDESAIPLQLCNGTDFRQKIAGGNGLRSLIEVHRKPYGIPQGSPISDLLANFYLMQFDKVVATRVRELGGAYFRYSDDILIVAPIEADAAVDLEAWVRQEIVCHGPKLQIKAEKSAIFRYWGTGGDQIWTRIAGEQGKNGIEYLGFRYDGNSMFLRDSTLSGLQRKAASSAMRLALSLVQRYPGKSSSDILTDVNLSTFLQRYGRVHDFESKADNVKNWTFWTYATKAASITAPLGLPIFKQLRNYRRNMRNHVKRALEKKGLARGPNPRVFTS

SEQ ID NO: 157 - protein, 489 aa, Sinorhizobium saheli
MTIRAHGNLAPSRSCSPAGEWTFKPKSYPHFDAFLSEDDARSLAADPTRVASHAFFPFLRYHQRWTKFTDKGEKGDVKERPIRFASRADSYIFSYYRHLLSQPFEKELKERGLDGSVLAYRRVIGANGRGQCNIHFALEAISAIRALGNCCAIALDISSFFESLDHGRLKAIWCGLLGTDRLPADHYRVFQAITAYSVVDREELFERLGYIGPKYMSKTGEPINGYLVEKSLIPRRLCTGQEFREKIAGGDGQKSLIKKHRKPYGIPQGSPISDLLANFYLLDFDTAVKAKVDGMGGRYFRYSDDILIVVPVDRVAAVELEEWVRSQIVLHGPKLRIKAEKSAIFCYEGSGGDQSWSRIMGEQGKNGLEYLGFRYDGRNMFLRDSTLSGLQRKAAASAKRVALGLLRRYPEKSTDQIIAEFNVSAFLQRYGRVQDFESKADDVRNWTFWTYATRAAKITAPLGLPIYRQLRNYRRNMRAHLKRALEKGR

SEQ ID NO: 158 - protein, 484 aa, Novacetimonas cocois
MTKNFNFTQDDLKKYPHFDAPISLKNIKRLVTSPDRVAKNTFYPLFLYHKSWQPFRLKGHFRPSKKIRPIRYGARRDAYIFSHYRNILSDLYEKRLHEMDISSCPIAYRKIKRPDGRGKCNIDFAKDAFDTIDFLGNCVAICLDIKGYFESLDHLQIKQIWCDLLGVTKLPADHYAVFKNITQYHYVDQKNVYTRLGYWGVLDPSKPLVEGPLKSIPIQICTPKEFREKICGLDGKSGPSLIEKNSYNYGIPQGAPISDIIANFYLLYFDKKINDYVRSQGGKYLRYSDDILIILPKNSLNLKYTIDFVSDELAKNGKNVSIKKEKTSIVEFFLNNGLRSNKTIAYDGFINNKDGLEYLGFRYDGNNVYVREGTVSRFYRKISIGAKKYSREYVKDNPKKDIPTLINDFNFSIFYQKYGKVNKKYYIENDYKSWTFYSYIKRSCDIFEEKGKIIRKQFSNFQKFVKKKVSNAIVKSWNKKNNFP

SEQ ID NO: 159 - protein, 454 aa, Flavonifractor sp.
MTKQEWLTSETVIEKSRRSYAHFDCRTDIAQQRSYISVPQNIEQHGFYPFIHYQQRQVKFNKETGPKEKKRDICYASHIDRCIYQYYSFLLGEKYNQRVVKDGLSNVAVAYRTDLHKNNIHFAKRVIQFIRNNSPCYIMIGDFTGFFDHLDHGYLKQQWCSLMGVSELPKDHYKVFRSVTRYSTWELSDLLALNSLKDNRAGRRTLNSMLRVLTPEEYKANSNRKHIKPNPDAFGIPQGSPISGLLANVYMLEIDKTVNDLITEKNGLYMRYSDDFIVVLPDTESTTRQILKNVSTSFNSIPGLALEPNKTQYFRYEDTKLENCGSLFGVPLEGQKRFINFLGFTFDGKTVSIRMKTLGKYYYRMYSKAKTIQKSGNYSPKGKHISNKNLYALYSIKGAKGSWITQVDGTQKWHSGNFLSYVQRATKEFGSHESLERGTKNHMAKIRRALEGKK

SEQ ID NO: 160 - protein, 396 aa, Ignatzschineria cameli
MTNPKKVARHSFYPMLRYCAFTIKLGKASEDASLVKNHKAREITYASHLDSHIYAYYGKVLELSYEEILSQLNLSDVVLAFRRLGKSNVDFAYEAFKEIESRKDCDVIALDITGFFDNLDHQHLKDAWAKLLHKEQLPEDHYAVYRSLTRYAYCIRDEIYKEFEISLNNPWYQRKKICSADEFRSRVRGKRYILINSTDRGIPQGTAISALLSNIFMLNFDKKLHSKMNDLGGSYRRYCDDMLFILPKSQQFDVESFVASEIEAYGLSINSKKTEKRLFREGISNKALQYLGFTYDGKRILLRSAALARFSEKMNKSIRLVKKTVAKESKKVGYKVPLRRKKLYERYSHLGRRNFITYGLRASKVMNSRAIRKQMKPLWDRLNQKLDEVDQSINDE

SEQ ID NO: 161 - protein, 396 aa, Ignatzschineria indica
MTNPKKVARHSFYPMLRYCAFTIKLGKASEDASLVKTHKAREITYASHLDSHIYAYYGKVLELSYEQILSQLNLSDVVLAFRRLGKSNVDFAYEAFKEIESRKNCDVIALDITGFFDNLDHQHLKDAWAKLLHKDQLPEDHYAVYRSLTRYAYCIRDEIYREFEISLNNPWHQRKRICSAYEFRSRVREKEYISINNTDRGIPQGTAISALLSNIFMLNFDQKLHSKMNDLGGSYRRYCDDMLFILPKSQQFDVESFVASEIKAYGLSINSKKTEKRLFRDSKSNKALQYLGFTYDGKRILLRSAALARFSEKMNKSIRLVKNTVNKESKKMGYKVPLRRKKLYERYSHLGHRNFITYGLRASEVMNSKAIRKQIKPLWDRLNQKLDEVDQSIKDQ

SEQ ID NO: 162 - protein, 503 aa, Bartonella sp.
MTNWKPSIKKYPHFDAIPSLATIDKIVRDHEAVAKHAFFPFLKYDQRTNLFSKKGEKGKIKERPIRYAAHLDSCIFSYYRHMLSVLYEEKLKKVNLEQSVLAYRRIINEKTHRGCCNIDYAYDAIKFIRDSKKCFTISLDISNFFENINHKLLYNAWLELLENQELNKECSDGKQVNTLPDDYYDALIRHKLPNDHYHVFKAVTKYAFVDLLSAYKRLGFYGNKKNSRGIIYEGYLLKHSNIPRQLCSVKDFRQKIAGDDGTPSLIQKNTTEVGIPQGAPMSDLLANLYLFEFDKYAHELCNKYEAKYFRYSDDILIIGRFDYNAVLQIEKEICSTIKNQFQLEIKEEKSAIHEFISHGSVQSVIVHKASTKYKLNSKTKPFEYLGFRFDGKNVFIRDKTMSNLHRKITYRCRATALSLKKRYSDKSMPDILKIYNFENLYQSFGNVERFFEKNRDYNNWTFNTYAKRASKIFDDFGKPIQKQISGLRRKIKKRFEYELSKIC

SEQ ID NO: 163 - protein, 313 aa, Neisseria dumasiana
MTREPKKRVISYASHKDSHIFSYYAYILNDKYEHLLNNSYSSINNSVLAFRKLGQNNINFAQQAFNNIKQAKNCSVIALDISDFFGNLDHKILKQQWCKLLGTHTLPVDHFAVFKAITQYTTISKDILFKEFKISSHTPRSNNRKRICTPEEFRSFRKKHKLSLALPDQNLFIPNKNKGIPQGSPISALLSNIYMIDFDAFCHNKISELGGLYLRYCDDILCIVPTPRVDEIQHLVNQEIMKLKLKIHPTKTEIITFKYDDKKRKVLNDKKLQYLGFILKDESITIRPAAFTKYSKKMKRGVSLAKQTQRKYN

SEQ ID NO: 164 - protein, 425 aa, Spongiibacter pelagi
MTSKDDGWYRKRGYLHFDHPIGYKKARKIVANPKAVAKHSFWPLIHYEITTPKITKNSAGDVVRKEKARPIAYASHLDSHIYAYYAQILAELYENRLAALGIGEHVSAFRSLGKSNIEFARDAFKSISEFGPCAVVGVDITGFFDNLDHAILKMQWSSVLGEPQLPHDHFAVFKSLTRFALVSRESLYDQLGISKHNPKNGRDRICKPEEFHSLVRKTGLISSNKGSKGIPQGTPISALLSNIYMIEFDKRMAEVVSEWGGRYFRYCDDMLFIVPQEFEKTVGGMVTTEIKALKLAINPKKTEIRLFSKNAEGGLHSNQPIQYLGFLFDGQQILLRSAALSRYSDRMKRGVKLARRTCGKRNTARINRGQHPRPLYKQKLYERYSHFGRRNFVRYGLRAADIMDSKAIKRQLKPLWKNLQNEIEK

SEQ ID NO: 165 - protein, 425 aa, uncultured Zhongshania sp.
MTSKDDGWYRKRGYLHFDHPIGYKKARKVVANPKAVAKHSFWPLIHYEITTPKITKNSVGDVVRKEKTRPIAYASHLDSHIYAYYARILAELYENRLTALGIGEHVSAFRSLGKSNIEFARDAFKSISEFGPCAVVGVDITGFFDNLDHTILKMQWASVLGEPQLPHDHFAVFKSLTRFALVSRELLYHQLGISKHNPKNSRDRICKPEEFHSLVRKTGLISSNKGSKGIPQGTPISALLSNIYMIEFDKKMAEVVSEWGGKYFRYCDDMLFIVPQEFEKTVGGMVATEIKALKLTINPKKTEIRLFSKNSEGKLHSVLPIQYLGFLFDGQQILLRSAALSRYADRMKRGVKLARRTCSKRNTAKIRRGQHPRSLYKQKLYERYSHLGRRNFVRYGLRAADIMDSKAIKRQLKPLWKNLQKEIEK

SEQ ID NO: 166 - protein, 525 aa, Hansschlegelia plantiphila
MTVCRTLEQNQRPFSQPPRPWVLPKAKLKTYRHFDAIMSIEQAEALANDPARVAAHAFYPLLRFDEIKRYFRRRDQPHRPSKLRPLRYAARSDAYIYMRYRDWLSALYEERLMAEGLDDVVLAYRRVASPYRPGNKCNIDFAYDAVNHIRRLGDCYAICLDIKSFFENLDHARLKRVWASVLGLPDLPPDHYRVFRSLTKYVQADLFEVYRRLGIWGQKTVGGRPTPVEGYLVDRRKIPVRLCDAETMREIVFGDGGKHDRIAEVRTEAYGIPQGTPISDLLANMYMLDFDAEMKKLAASSGGVYMRYSDDILFVVPAEDIDPKAFVEGVSRSIGTYGDQLQIAKDKTSIHRFTPAAKGQTCQNAKEDAERPSKRFEYLGFSFDGQKVRIRDSTMSSLVQKVAAVAKREGVAAALRYPSKSVDQICEEFNYAGLYGRFLRVRDFETVEDKSDWTFWTYVRKIESTMKADGRPAMRQVRNLKVQIRRRFRLYVQTTRDGAPARALQSAAARLRQATPSNAETAAQA

SEQ ID NO: 167 - protein, 428 aa, Alcanivorax sp.
MVKGEHPWYRKRGYLHFDLPVGIKKASAIVLDTEKVSRHAFWPFIDYQIVTEKLSKDADGDLKKKIKERLIAYAAHLDSHIYSYYSNLLSQFYEEELKKRQIGRHVLAFRALGKSNIHFARDAFKAIESFGPCGVIALDVSGFFDNLNHDYLKSRWSELLGKSLLPKDHYNVFKSLTKFSTVNRDALYSRLNIAKHNPKNGRERVCSTKEFDRKVRKEKLIIPNRNNHGIPQGAPISSLLSNIYMLEFDQKMSESVAEWGGHYFRYCDDMLFVVPQEFTNSVAGMVVTELKSLGLTINSSKTEIRTFENIGDGQKSNKPLQYLGFLYDGQSILIRSAAFARFSERMKGGVKLAKSTQVKRNAIRVRRGEKPTRLFKQKLYERYSHLGRRNFIRYGLRAAEIMDSKAIKKQLKPLWKNLQEEIHKSTKK

SEQ ID NO: 168 - protein, 443 aa, Rheinheimera sp.
MVKKHDWYRLRGYLHFDAPIGLKKANAIVTNTNRVATHAFYPLLHYTIESFKVFKNEQGAIEKKVKHRPIAYASHLDSHIYSYYSRVLSAKYEIALKDRGLEKNVIAFRALGKSNIDFANDAFEEIKKRRSCSAIALDITGFFDNLDHQILKEHWCYLLEEDKLPNDHFNVFRSITRFSKVCRDTVYERLKIAKNNPKNGRFKICEPEVFRRVIRANKLIQVNTDLKGVPQGSPISALLSNIYMLTFDVAAKNIAEQYDGCYYRYCDDMLFIVPTAYKDLVEKAVMAEIEKVKLDINPKKTEIRDFWPSGAVMQSSKPLQYLGFIFDGQHKLIRSAALARFSGRMKSGVRLAKKTQRKANYREIIAGKEVSRLFKHKLYERYSHLSSRNFITYGYRAAKIMQSQAIRTQLKPMWGRLQKEISDDNPLSNVTFSDLLFGTHKEQ

SEQ ID NO: 169 - protein, 499 aa, Sphingomonas pollutisoli
MVLGEERFRKENSVWDADVLPPSRGGRVVDWSPSLKHYPHFDKPIRHKDIEELVRNPDAVSRNSFYPFMRFEEKWQPFRDKVGGKPKKKIRQLRFASRRDAYIYSYYRHILRDPYEASLRARDLEHSVIAYRKLVTPTGKGKSNIDFALDAFNVIRNFGHAAVVTLDISAFFESIDHELLRQKWCSLLGTAELPRDHRAVFRAITRYSIVDRDAAYERLGYLTWEAKGAGKIPVYTTGFKDMPRQLCSNSEFREKICGKGGTFASLIETNENDFGIPQGSPISDMLANIYLIDFDSALKAYVDAVGGTFFRYSDDIIIIVPGEEIEAIAARDFAMNEIKKHGSKLLIKESKTSVLRYFSVPGGQDFKKIHGEQGTNGLEYLGFRYDGKAAYLRDSTMSRLYRKVTRSIRAEARALVRRYPEKDQSYIESKFNAAKFMQRYGRVEDFDPKASYDTWTFWTYARRAIEIFGPLGKPISGQLKNYGQIVRTRMTHEIAHALS

SEQ ID NO: 170 - protein, 425 aa, Yersinia ruckeri
MVQPEHPWFRTRGYLHFDKPISLKKTLRLVTDPSKVAKHSFLPFITFDVKSYKISQDKITKKITKDEKERKIAYSSHVDSHIYAYYAAILSGIYEEKLKDYGISNNVIAFRALNKSNIEFANEAFNSIKNRKECGAVALDLSKFFDTLDHLQLKDAWCRLLGTEELPEDHYAVFKNITRYSAVYKNKLYEHLKISKNNPKFKRFSICSFDDFRNNVRKSKLITQNKSGYGIPQGSPISALLSNIYMLNFDIDMKNYVNSVGGDYYRYCDDMLFIVPLDQIDKVAGIAERELFKLKVKLNVKKTELRSFTSTSERITADKPLQYLGFLFDGHNIYLRSSSLSRYSDRMRRGVRLAKATMKSKNKTRVAKGLVKKSLFKEKIYARYAHVGKRNFLTYGYRAARIMESSTIRKQLKPLLQRLKNEIEK

SEQ ID NO: 171 - protein, 425 aa, Yersinia pseudotuberculosis
MVQPEHPWFRTRGYLHFDKPISLKKTLRLVTDPSKVAKHSFLPFITFDVKSYKISQDKITKKITKDEKERKIAYSSHVDSHIYAYYAEILSGIYEEKLKLYGVSSNVIAFRALNKSNIEFANEAFNSIKNRKECGAVALDLSKFFDTLDHSQLKDAWCRLLGAEELPEDHYAVFKNITRYSAVYKNKLYEHLKISKNNPKFKRYSICSFGDFRNNVRESKLITKNKAGYGIPQGSPISALLSNIYMLNFDIDMRNYVNSVGGDYYRYCDDMLFIVPLDQIDKVAGIAEKELFKLKVTLNIKKTELRTFTRTSERITADKPLQYLGFLFDGHNIYLRSSSLSRYSDRMRRGVRLAKATMKSKNKTRVAKGMVKKSLFTEKIYARYAHVGKRNFLTYGYRAARIMESSTIRKQLKPLLQRLKNEIEK

SEQ ID NO: 172 - protein, 425 aa, Yersinia aleksiciae
MVQPEHPWFRTRGYLHFDKPISLKKTLRLVTDPSKVAKHSFLPFITFDVKSYKISQDKITKKITKNEKERKIAYSSHVDSHIYAYYAAILSGIYEEKLKDYGVSSNVIAFRALNKSNIEFANEAFNSIKNRKECGAVALDLSKFFDTLDHLQLKDAWCRLLGAEELPEDHYAVFKNITRYSSVYKNKLYEHLKISKNNPKFKRYSICSFDDFRNNVRKSKLIEKNKSGHGIPQGSPISALLSNIYMLNFDIDMRNYVNSVGGDYYRYCDDMLFIVPLDQINKVAGIAEKELFKLKVTLNIKKTELRTFTSTSEIIPADKPLQYLGFLFDGHNIYLRSSSLSRYSDRMRRGVRLAKATMKSKNKTRVARGMVKKSLFKEKIYARYAHVGKRNFLTYGYRAARIMESSTIRKQLKPLLQRLKNEIEK

SEQ ID NO: 173 - protein, 333 aa, Bacillus inaquosorum
MVYNSKGEYASRVFDRVIGYDYIPLLALPNMNEKKYRVKGYKHLDNKKSIEKVKGKIQNPRWVAKHGFYPFMHFEIKFQKYSRKEKKPKEKVRKIFYASHMDSYIYKYYGDKLNNHYNSVVDKLGINEVATAYRNNLSGKSNINFAKEVIDFIKVQQSAYIFVADFTNFFDTLDHRYLKEKIRYVLKKDTLPDDYYNVFKNITRFSYFIKDTIESELKNKYTESEIKNSYKYFTEEEFRSFKHKNIYKNSKSYGIPQGAGISSVCSNIYLLDFDEKLQKYVKEQKGLYRRYCDDLIIVIPIEGDVQDYNYKIHQKIMDDIKEQIPNLEIQPEK

SEQ ID NO: 174 - protein, 428 aa, Klebsiella sp.
MVYREHSWFRKRGYLHFDKPISEEHALNIVTDPYAVATHSFLPFITFTSTTFKVQKDKGTNAINKTIKERPIAYSSHVDSHIYSYYASILNELYEEELKKNNITDNVLAFRALNKSNIEFAYDAFQEIKKRGNCSAAALDLSKFFDTLDHSFLKKSWCQLLTTEKLPEDHYAVFKAITKFSKVDKNEVYELMGLPKNNAKHTKKTRKQICSFEDFRNKVRQSNLIIPNKANFGIPQGSPISALLSNIYMFNFDIEMKQYVTSLGGAYFRYCDDMLFIVPTHEKNNVAGEAEKRLFKLKVNLNVKKTEIRDFFATPNKIKCDKPLQYLGFIFDGHNIFLRSSSLSRYSDRMKRGVRLAKATMKSKNKIRKSKGLPNKELFKEKVYARYAHVGKRNFLTYGYRASRIMHSNSIRKQLKPLWERLQKEINK

SEQ ID NO: 175 - protein, 195 aa, Aeromonas media
MWCKLLQKNSLPNDHFNIYRSLTKSSVVNRDLLYTALKISKNNPKTAGLRLCDINTFREKVRGLELIKTNSTGRGIPQGTSISALLSNIYMLDFDKKIKDIVKSISGEYYRYCDDMLFIIDSDNTSELMSLVTQSISELKIEINDKKTEIRTFHTYRGVQKCDKPLQYLGFIYDGERKLIRSAALAREGANKSLI

SEQ ID NO: 176 - protein, 446 aa, Mitsuokella multacida
MYPTKRYPHFDKVIRFLDVKSYVCDPRKVAKHSFFPLIHYIKVSKRYSLRPINEAEKDVHRQHIKKKERDIMYAAHLDGYIYRYYADRLNQKYDEMAMDHHIDAVAIAYRDNKKGNSNIQFAREVFDFIAAHPHCYIRVGDFEHFFDRLNHMYLKKQVKDVLQTESLPQDWYKVLHSVMRYTCVDRKIVAPFYDKRSKRYFRSIKDYRKFRQSRRDAFRVNQAGVGIPQGTALSGVLANVYMIAIDEKIQQFVQSYGGLYRRYSDDTIIVIPLDEGPSVDLKALDDMLQEWIHEAYLSEQLDKTKCFFYRDSVLYDASKQDDSCACARVHAMDYLGFTFDGKEVKVREKGIYKFERKASTAIHHARAIKRKYHLEKLPFRASILRYYFPNGYKKNQSGRRKRQSNFLGYLDRVDSEFQDRRVSCKSEKQVVKLNRKIKNAYDRASE

SEQ ID NO: 177 - protein, 446 aa, Mitsuokella multacida
MYPTKRYPHFDKVIRFSDVKSYVCDPRKVAKHSFFPLIHYIKVSKRYSPKLINEAEKDAHRQHIKKKERDIMYAAHLDGYIYRYYADRLNQKYDEMAMDHHIDAVAIAYRDNKKGNSNIQLAREVFDFIAAHPHCYIRVGDFEHFFDRLNHMYLKKQVKDVLQTESLPQDWYKVLHSVMRYTCVDRKIVAPFYDKRSKRYFRSIKDYRKFRQSRRDAFRVNQAGVGIPQGTALSGVLANVYMIAIDEKIQQFVQSYGGLYRRYSDDTIIVIPLDEGPSVDLKALDDMLQEWIHEAYLSEQLDKTKCFFYRDSVLYDASKQDDSCACARVHAMDYLGFTFDGKEVKVREKGIYKFERKASTAIHHARAIKRKYHLEKLPFRASILRYYFPNGYKKNQSGRRKRQSNFLGYLDRVDSEFQDRRVSCKSEKQVVKLNRKIKNAYDRASE

SEQ ID NO: 178 - protein, 428 aa, Yersinia ruckeri; identical to SEQ ID NO: 4

SEQ ID NO: 179 - protein, 427 aa, Pseudomonas sp.
MPENWYKSRGYLHFDRPINQAAALEIVSSPKTVAKHAFYPFIRYVAQTQKVFFDKNIGKVVKKDPKQRPISYAAHVDSHIYSYYCELLNRAYENHLAKVQWSSAILAFRALGKSNIDFARDAFLDIATRDSCCVIAIDIKGFFDNLDHAHLKNAWQSLLGSSQLPDDHYAVYRSLTKFSFVYRDQVYEALGLSKSNPKQGRKRICEPREFRAKVREGGLIETNKDKKGIPQGSPISAMLSNVYMMGFDEQIHAHVESCGGAYYRYCDDVLLIVPLEKEAEAKALVDLRVNEIGLEIQVAKTETCKFTRSAKGLRSDRPLQYLGFIFDGANIYLRSSSLARYQDRVHRGIWLAKKCMNKVNAKRISRGQLPRSMFLKKLYKRYSYLGRRNFISYGYRAARIMNAPSIKKQLKPHWNRFRERISEAQGE

SEQ ID NO: 180 - protein, 427 aa, Pseudomonas sp.
MPENWYKSRGYLHFDRPINQAAALEIVSNPKTVAKHAFYPFIRYVAQTQKVFFDKSIGKVVKKDPKQRPISYAAHVDSHIYSYYCEQLNRAYEDYLAKVQWSSAILAFRALGKSNIDFARDAFLDIATRGSCCVIAIDIKGFFDNLDHAHLKNAWQALLGSSQLPDDHYAVYRSLTKFSFVYRDQVYEALGLSKSNPKQGRKRICEPHEFRAKVREGGLIETNKDKKGIPQGSPISAMLSNVYMMGFDGQIHAHVESCGGAYYRYCDDVLLIVPLEKEAEAKALVDLRVNEIGLEIQATKTETCKFTRSAKGLRSDRPLQYLGFIFDGANIYLRSSSLARYQDRVHRGIWLAEKCMDKVNAKRISRGQLPRSMFLKKLYKRYSYLGRRNFISYGYRAARIMNAPSIKKQLKPHWNRLRERISDAQGE

SEQ ID NO: 181 - protein, 427 aa, Shewanella sp.
MLKETPKWYRSRGYLHFDLPINQEKATLLVTSPSRVAKHPFFPLISYVVLSKKISKDQSTGTLNVVTKDRPIAYSAHKDSHIYAYYSQILSEKYEKELIKNNLQDSILAFRELGKSNIDFAYEAFCRIKSLGECSAVALDFSKFFDTLDHDLLKKSWANLLGKQKLPTDHFNVYKSLTKYSKVDKATLYKALSISINNPKNGRFRVCNASEFRSMVRDKGLIETNKSRYGIPQGSPISALLSNIYMLEFDKEMKRFVDIYNGYYYRYCDDMLFIVPTELRNTVAGFAAKHVKALKVSINPKKTELRSFKKVGDTLISEQMLQYLGFMFDGENIYIRSSSLARYSEKMKRGISLAKQTMRKYNCIRADKGATEKELFKKKLYSRYTHLGAKNFITYGLRAAKKMDNSKTIRRQLKPLWQRFHEEINRD

SEQ ID NO: 182 - protein, 427 aa, Shewanella baltica
MLKETPKWYRNRGYLHFDQPINQVKATKLVTSPFQVAKHPFFPLISYVVLSKKISKNPSTGMLNVVKKDRPIAYSAHKDSHIYAYYAEMLSVKYEEELTKNNLQDSILAFRELGKSNIDFAYEAFCKIKNFGQCSAVALDFSKFFDTLDHDLLKISWAHLLGVKKLPSDHFNVYKSLTKFSKVDKDKLYEALSISKSNPKNCRLRVCDASEFRSRVRDKGFIETNNNSYGIPQGSPISALLSNIYMLEFDKEMKRYTDIHGGHYYRYCDDMLFIVPTKLRDNVAEFADKHVKALKVNINTKKTELRTFRKIGDTLVSDQMLQYLGFMFDGENIYIRSSSLARYSEKMKRGISLAKQTMRKYNDIRAEKGATEKELFMKKLYSRYTHLGAKNFVTYGLRAANKMGNSKTIRRQLKPLWRRFHEELDKD

SEQ ID NO: 183 - protein, 81 aa, Pseudomonas mendocina
MIETNKINKGIPQGSPISAMLSNVYMMSFDEQVHAYVQACGGSYYRYCDDVLLIVPLAKEAEAKDFVNQKVDEIGLEVQVS

SEQ ID NO: 184 - protein, 430 aa, Bacillus velezensis
MNEKKYRVKGYKHLDNKKSIEKVKSKIQNPRWVAKHGFYPFMHFEIKFQKYSRKEKKRKEKVRKIFYASHMDRYIYKYYGDKLNNHYNSVVDELGINEVATAYRNNLSGKSNINFAKEVIDFIKVQQSAYIFVADFTNFFDTLDHRYLKEKIRYVLKKDTLPNDYYNVFKNITRFSYFIKDTIESELETKYSESEIKNSYKYFTEEEFRAFKHKNIYKNSKSYGIPQGAGISSVCSNIYLLDFDEKLKKYVKGQKGLYRRYCDDLIIVIPIEGDAQDYNYQIHQKNMNDIKEQIPNLEIQPEKTGNYFYIDNQITDLDFNETKLDYLGFSFNGKEVRIREKSLFKYYTRTYRKVRICNRKSKEFGRKSYRRELYKTYSHLGKNKKGHGNFISYVERAQKIFDEDSKTINLMETQVKKHWKNIQSRLEQLE

SEQ ID NO: 185 - protein, 465 aa, Lysinibacillus capsici
MKDISYFENYKSKNYLHIDKRIPIKRVYKLIQDEKWVSKHAFLPFIHYSIDLKKYTFKEGHSNRSYKKLKLNKNFNQRHIKYKKPKKREINYASHIDSFIYKYYGDELNNTYNEYAIKNGIDENVLAYRNNKKGKNNIHFARDVFDFIIRTEKSLIIALDFSSFFDKISHKHLKTSIKELLHVDELSEDNYNVFKSITKFHYIEKSDLDNHLKSQYSEDELKDMLKYRKINSYMDLKVFRQLVKEKKLNIKANRNPYGIPQGSGMSAVCSNIRLTKFDIEMKCWSDKKNALYRRYCDDLIWIIPNVNDDEMASIVEEIYSIIEKYDDLHLQKEKTIILNYNGNKMLDLHGYDSKLDYLGFIFDGQVIKVREKSLFKFYNRAYKKTKVLAKYNLIYGRNAYMRNFYGLYSHLGRNYKGKGNFISYAYKAQKIMEELPVEVVIRKQVKRHWNKIHKRLEEYKKEYSN

SEQ ID NO: 186 - protein, 427 aa, Pseudomonas aeruginosa
MPENWYKSRGYLHFDRPINQAAALEIVSSPKAVAKHAFYPFIRYVAQTQKVFFDKSIWKVVKKDPKQRPISYAAHVDSHIYSYYCDLLNQAYEGHLAKVRWASAILAFRALGKSNIDFARDAFLDIAARKSCCVIAIDIKGFFDNLDHTHLKNAWQAILDTSHLPDDHYAVFRSLTKYSFVYRDQVYEALGLSKNNPKQGRKRICEPHEFRAKVRDGGLIETNRDKKGIPQGSPISALLSNVYMMGFDEQIHAYVQSYGGSYYRYCDDVLLIVPLEKEAEAKALVDLRVNEIGLEIQTAKTEACKFTRSVKGLRSDRPLQYLGFIFDGANIYLRSSSLARYQDRVNRGIWLAGKRMDKVNAKRIARGQLPRSMFLKKLYKRYSYLGRRNFISYGYRAARAMNAPSIKKQLKPHWNRLRQRISDAQGE

SEQ ID NO: 187 - protein, 427 aa, Pseudomonas sp.
MAENWYKSRGYLHFDRPINQAAALDIVSNPKAVARHAFYPFIRYVAQTKKVFFDKSIGKVVKKDPKERPISYAAHVDSHIYSYYCEQLNQAYENHLAEMEWSSSILAFRALGKSNIEFARDAFLNIAARESCCVIAIDIKGFFDNLDHVHLKVAWQSLLGTSQLPDDHYAVYRSLTKFSFVYRDQVYEALGLSKNNPKQGRKRICEPHEFRAKVRDRALIETNKDKKGIPQGSPISALLSNVYMMGFDKQIHSYVQSCGGAYYRYCDDVLLIVPLEKEAEAKTLVDQRVSEIGLEIQAAKTETCKFTRSAKGLRSERPLQYLGFIFDGASIYLRSSSLARYQDRVHRGIWLAEKCMDKVNAKRIARGQLPRSMFLKKLYKRYSYLGRRNFISYGYRAARIMHAPSIKKQLKPHWSRLRERISTAQGE

SEQ ID NO: 188 - protein, 430 aa, Bacillus mojavensis
MNEKKYRVKGYKHLDNKKSIEKVKGKIQNPRWVAKHGFYPFMHFEIKFQKYSRKEKKPKEKVRKIFYASHMDSYIYKYYGDKLNNHYNSVVDKLGINEVATAYRNNLSGKSNINFAKEVIDFIKVQQSAYIFVADFTNFFDTLDHRYLKEKIRYVLKKDTLPDDYYNVFKNITRFSYFIKDTIESELKNKYTESEIKNSYKYFTEEEFRSFKHKNIYKNSKSYGIPQGAGISSVCSNIYLLDFDEKLQKYVKGQKGLYRRYCDDLIIVIPIEGDVQDYNYKIHQKIMDDIKEQIPNLEIQPEKTGNYFYTDNQITDLDFNETKLDYLGFSFNGKEVRIREKSLFKYYTRTYRKVRICNRKSKKFGRKSYRRELYKNYSHLGKSKKGHGNFISYVERAQKIFDEDSKTINLMETQVKKHWKNIQSRLEQPE

SEQ ID NO: 189 - protein, 430 aa, Alkalihalobacillus pseudalcaliphilus
MNKKKYRVKGYKHLDNKKSIDKVKSKIQNPRWVAKHGFYPFMHFEIKFQKYSRKEKQPKEKVRKIFYASHIDSFIYKYYGDKLNDHYNSVVNELGINEVATAYRNNLSGKSNINFAKEVIDFIKVQKSAYIFVADFTNFFDTLDHRYLKEKIRYVLKKDTLPDDYYNVFKNITRFSYFIKDTIEAELKTKYTESEIKNSYKYFTEEEFRAFKHKNIYRNSKSYGIPQGAGISSVCSNIYLLDFDKKIEKYVKEQKGLYRRYCDDLIIVIPIEGEVQDYNYQIHQKFVVDIKEQIPNLEIQPEKTGNYFYYDNQITDLEFNETKLDYLGFGFNGKEVRIREKSLFKYYTRTYRKVRICNRKSKEFGRKSYRRELYKNYSHLGKSKKGHGNFISYAERAQKIFDEDSNTINLMETQVKKHWKNIQSRLDKPE

SEQ ID NO: 190 - protein, 465 aa, Lysinibacillus sp.
MKWSNGPLQLHNLSSSSNINWEKYRSKGYLHFDERIHIEHMKANLLNKDWVASYAFLPFIHFEMNFKRFVTIKEIDEQGQVTKRKERGEPKKRKIFYSAHKDGYIYKFYGDLLNNAYNIYASENEIDDNVVAYRNNKLGKNNIDFAFEVFDHLFKFENAVVISSDFTKYFDNISHKTLKRNIRRVLGIKTLERDWYQVFKNLTQFTYVNREDIDKFLEEKYGRTLNKKIKTHQINRIMTSSEFRKSKKKYLKPNPNSDSYGIPQGSSMSAVCSNVHLIDFDKEISEWCKQKSANAMYRRYCDDLIVIIPLEKQSTNEFATIRNELFEIINKYKSDGLDVQQKKTEIRLWNGDNILDEQLQPSKLDYLGFVTDGQMIQLREKSLFNYYTRAYRKAKTVKRIEYATERPGPKRSLYDLYTHLGFEYKKRGNFVTYAYKAHNKMCRLPVKSLIKKQVKRHWGRIHRRL

SEQ ID NO: 191 - protein, 427 aa, Stutzerimonas stutzeri
MPENWYKSRGYLHFDRPINQAAALEIVSSPKAVAKHAFYPFIRYVAQTQKVFFDKSIGKVVKKDPKQRPISYAAHVDSHIYSYYCDLLNQAYEGHLAKVRWASAILAFRALGKSNIDFARDAFLDIAARKSCCVIAIDIKGFFDNLDHTHLKNAWQAILDTSHLPDDHYAVFRSLTKYSFVYRDQVYEALGLSKNNPKQGRKRICEPHEFRAKVRDGGLIETNRDKKGIPQGSPISALLSNMYMMGFDEQIHAYVQSYGGSYYRYCDDVLLIVPLDKEAEAKALVELRVNEIGLEIQTAKTETCKFTRSVKGLRSDRPLQYLGFIFDGANIYLRSSSLARYQDRVNRGIWLAGKCMDKVNAKRIARGQLPRSMFLKKLYKRYSYLGRRNFISYGYRAARAMNAPSIKKQLKPHWNRLRERISDAQGE

SEQ ID NO: 192 - protein, 431 aa, Bacillus gobiensis
MNKQKYRVKGYTHLDNKKSIEKVKNNIQNPRWIAKHGFYPFIHFKIKFHKYNRKLKKPKEKIRKIFYASHIDSFIYKYYGDKLNNHYNSVVEELGINDVAIAYRNNLSGKSNINFAKEVIDFIKAQQNAYIFVADFTNFFDTLDHRYLKEKIRYTLKKETLPDDYYNVFKNITRFSYFIKDTIESDLKIKYTESEIKNKYKYFTEEEFRAFKHKNIYKNSKSFGIPQGAGISSVCSNIYLLDFDEKIKKYVDERNGLYRRYCDDLIIVIPHGGDAQLYNFQIHQQFVENVKKQVPNLEIQPEKTGNYFYTNNKIMDLEFNETKLDYLGFSFNGEEVRIREKSLFKYYTRTYRKIRICNRKSKEFARKSYRRELYKNYSHLGKNKKGHGNFLSYVSRAQKIFDEKSSTENLMETQVKNHWKNIEYRLEDPKL

SEQ ID NO: 193 - protein, 425 aa, Agarivorans gilvus
MTTKIPEWYRRRGYLHFDLPIAYKNAYKLVTNPALVLTHAFFPLINYSVISKKINRDKNTKKIDYATKERPIAYSSHVDSHIYAYYASLLSELYEQRLRSSGLDKNVLAFRGLGKSNIDFAFEAFQQIKAMGECSAVALDFSKFFDTLDHALLKKSWADLLGESKLPPDHFNVFRSLTKFSKVDKFKLYQEFSISTNNPKNGRFRVCSARDFRERVRKKNLIITNPHPYGIPQGSPISALLSNIYMFNFDLEMKKYMNIHGGKYYRYCDDMLFIVPTPLRDKVAGYARQEVDKLKVSINPNKTELRTFYFKDGVLNSDRMLQYLGFMFDGEDTYIRSASLARYSEKMKKGIRLAKKTMKKYNSIRASKGLPKRNLYKRKLYSRYTHLGGRNFITYGLRAAKTMQSKTIKRQLKPLWRRFNDELEK

SEQ ID NO: 194 - protein, 239 aa, Legionella quinlivanii
MNRETSPCWFKQRNYIHFDSRLSLKNTIKLVTNPACIIKHSFYPFIKDTLCEKKINNSLERNVKERQVLYASHADSHIYSYYAHLLSEKYEQFLLNKGLANHVLAFRKIPKPQSEKNMCNIDFANHAFREIVSLGNCVALVIDIKGFFDNLDHEILKQNWICLLEDQNFLPEDHYCVYKSLTKYSFVEKEQLYEKLSISKNNHQRLPNYKYCHPSTFRKLIRGNKLIQINSNNYAIPQV

SEQ ID NO: 195 - protein, 426 aa, Marinomonas sp.
MPSVPPKWFRSRGYLHFDLPVGYKKAVAVVTNPDIVARHAFYPFINYTVKSKKINKDKITNELNISFKERPIAYSSHMDSHIYAYYTKILSKKYEDKIRNSGLENSILAFRGLGKSNIDFAYDAFEKIKKSGECSAVALDFSKFFDTLNHKFLKDSWASLLNSSKLPADHFNVYKSITKFSTVNKLDLYEKFEISINNPKNGRKRVCTAKEFRDIVRKGNLIVPHKAPFGIPQGSPISALLSNIYMFDFDIKMKNYVDECGGEYYRYCDDMLFIVPTELRDEVAGIAQEKVKELGLSINTDKTELRTFKYENRQLKADQMLQYLGFIFDGENIYIRSSSLARYSEKMKRGVSLAKKTMKKYNAIRDNKGLSRESLYKRKLYSRYTHFGGRNFITYGLRAAKKMNSKTIKHQLKPLWRRFNDEIEKF

SEQ ID NO: 196 - protein, 434 aa, unidentified
MNVQEWLDNPKTIQKSKKGYAHFDYRIDITKAAEFIKNPENVAHYGFYPFIHYTMKMNKYNAKTGKKLKKREICYAAHLDRCIYQYYAWGLNELYNKRIRKLGIEKVPVAYRTDLSESNIQSAKKAFDFIKENPQCCVMIGDFTNFFDSLDHQYLKQRWGDLIESVQLPPDHYAVYKNITRYSTWELDDLLELNDLSDVKGKIRKLNEKKVVLTKEQYKANRKHIKKNSVSYGIPQGSPISAVLANIYMLDADALIYQAVMKCKGFYMRYSDDFIVVLPEENQIDTFKSIIDIINAIPGLKLENRKTQFFQVDTPTVINIGKSFSIDADDSQKKINFLGISFDGKNIFVRAKTVSKYYYRMNHKAKVIAKNRELKGADKLYQRYSERGAFGKRGNFFTYINNAEREFGKDEKIRYDVMNHMSKIRRSLNNQSRE

SEQ ID NO: 197 - protein, 475 aa, Devosia elaeis
MPAWAPLVRTYPHFDPLLTGEKAASIALDPQAVAAHTFYPFIKYDERWTLFAEAGEPGRPKERPIRYAARLDACIFSYYRHMLSEPYERRLEAEGLTETVLAYRRVRASTGKGGKSNIDFAKEAFQYAQALGDCCAISLDISSFFESLDHQRLKSLWASLLGLERLPPDHFAVYKAMTRYAYVEKLEAYERLGFYGKKVGPGGRSVMGFLVDPRAIPVQLCKGEQFRTRIAGGDGSGSIIKLNRTPHGVPQGAPLSDLLANLYLLDFDMQMKALAESVGGRYLRYSDDILFVAPVTAEHATRLEAEARGAISRFGDALVIKEKKSFIHEFAADGMGQIVATIKPEGSNKGLEYLGFRYDGRNAYIRDKTLSALHRKIVASCRAVSIHLERRYRSKSPQEIIALYNFEALYQRFGAVDAFKDKQTEYRNWTFWTYAKKAIRTFGPLGAPMTHQVSRLRRQIRKRLASEVARACARR

SEQ ID NO: 198 - protein, 427 aa, Aliivibrio fischeri
MKILTTDWFRPRTYLHFDLPINIKKAPKIVTNPDAVSKHAFYPLIHYVIEINKIGKDPISKKVIALPPKLRPISYPAHLDSHIYSYYSKILTHYYEDKLKEHGLSDSILAFRSLGKSNIDFALDAFNEVKKVGECSAVALDVTKFFDTLDHEVLKNEWCSLLKVQKLPKDHYNVFKSITKHAHVKKVDLYKLLGISLNYHNHGKRRVCEPQEFREQVRANKLIETNSFKFGIPQGTPLSAMLSNIYMFEFDLKMKQFVDEHNGKYFRYCDDMLFIVPTEIRTKVEQFAVNQIKGLKLSVNQKKTEIRTFTRVGEKLKADSHLQYLGFMFDGEDMFIRSSSLARYSERMRRGIRLAKKTMIKYNSIRYEKGLPERELFKRKLYSRYTHLGQRNFITYGIRAANKMESESIRRQLKPLFKRFNDELNKT

SEQ ID NO: 199 - protein, 465 aa, Lysinibacillus sp.
MKWSNGPQQLHNLSSSSNINWEKYRSKGYLHFDERIHIGHMKANLLNKDWVASYAFLPFIHFEMNFKRFVTIKEIDEQGQVTKRKERGEPKKRKIFYSAHKDGYIYKYYGDLLNNAYNIYASENEIDDNVVAYRNNKLGKNNIDFAFEIFDHLFKFENAVVISSDFTKYFDNISHKTLKRNIRRVLGAKTLERDWYQVFKNLTQFTYVNREDIDKFLEEKYGRTLNKKIKTHQINRIMTSSEFRESKKKYLKPNPNLDSYGIPQGSSMSAVCSNVHLIDFDKEISEWCKQKSANAMYRRYCDDLIVIIPLEKQSTNEFATIRNELFGIINKYKSDGLDVQQKKTEIRLWNGDNILDEQLKPSKLDYLGFVTDGQMIQLREKSLFNYYTRAYRKAKTVKRIEYATERPGPKRSLYDLYTHLGFEYKKRGNFVTYAYKAHNKMCQLPVKSLIKKQVKRHWGKIHKHL

SEQ ID NO: 200 - protein, 461 aa, Sutcliffiella halmapala
MVYNSKGEYACKGFFNRVIGYDYIPLLALPNMNKKKYRVKGYKHLDNKKSIEKVKVKILNPQWVAEHGFYPFMHFEIKFQKYSRKKKQPKEKVRKIFYASHIDSFIYKYYGDKLNNHYNSVVDELDIKEVATAYRNNLSGKSNINFAKEVIDFLKVQKNAYVFVADFTNFFDTLDHRYLKEKIRYVLKKATLPDDYFNIFKNITRFSYFIKDTIEAELKTKYTESEIKNSHKYFTEEEFRAFKHKNIYKNSKSYGIPQGAGISSVCSNIYLLDFDKKMEKYVKEQKGLYRRYCDDLIIVIPIEGEVQDYNYQVHQKFVDDIKDQIPNLEIHPEKTGNYFYSENQITDLEFNETKLDYLGFSFNGKEVRIREKSLFKYYTRTYRKVRICYRKSKEFGRKSYRRELYKNYSHLGKSKKGHGNFISYAERAQKIFDEDSNTINLMETQVKKHWKNIQSRLDKPE

SEQ ID NO: 201 - protein, 481 aa, Paracoccus sediminis
MTTFDFSSSDLKNYPHFDSPISLREIRKLVTCKTRVASNTFFPFMRYEEGWQPYREKGAAKPDRKSRPIRYGARRDAYIFTHYRRQLSKLYEERLVTLGISDCPIAYRKIRKPGQSGGKCNIDFAKDAFNEIDRIGNCVAIALDISKFFEHLDHARIKEIWCDLLGVARLPEDHFAVFKNVTDYRFVDQREVYRRLGFFGPKVVNGKSIEGFLQPFEDIPKKLCTMQEFRQKICGYGGVYTSLIQKNQGCYGIPQGSPISDLIANFYLIDFDLSLANYARSLGGCYMRYSDDILLILPGGEAAASAAADFAVQEITKQGNKLRIKNEKTCIVQYERDGQKLRFKHLSGPQGSGGLEYLGFRYDGRKVYIRESTVSRLYRKISSAINQAAHRHAEKNPSLPAADLIKTDSLLLSRFMRQKKEKLTDDHRTWTFYSYILRASSVFGVKGDRIFKQVDSFEAIMRRRVAAALVRAVSRRKPTAP

SEQ ID NO: 202 - protein, 427 aa, Pseudomonas sp.
MPENWYKSRGYLHFDRPINQAAALEIVSNPKTVSKHAFYPFIRYVAQTQKVFFDKSIGKVAKKAPKERPISYAAHVDSHIYSYYCDLLNQAYEEHLAKVRWASAILAFRALGKSNIDFARDAFLDIASRTSCCVIAIDIKGFFDNLDHAHLKTAWQVLLGSSQLPDDHYAVYRSLTKYSFVYRDQVYETLGLSKNNPKHGRKRICEPHEFRAKVRDGDLIETNKDKKGIPQGSPISAMLSNVYMMGFDEQIHAYVQSCGGAYYRYCDDVLLIVPLEKEAEAKALVDLRVNEIGLEIQAAKTETCKFTQSAKGLRSDRPLQYLGFIFDGANIYLRSSSLSRYQDRVNRGIGLAGKCMDKVNAKRIARGQLPRSMFLKKLYKRYSYLGRRNFISYGYRAARIMDSPSIKKQLKPHWNRLRERISAAQGE

SEQ ID NO: 203 - protein, 491 aa, Minwuia thermotolerans
MDSDYDFPLGDQKHYPHFDAPISRRKIRQMLRDFEAGPDRAFYPFFRYEQSWQPYRLDGEPKPERKTREIRYGARRDAYIFAFYRRKLARLYEARLAELGIAGCPIAYRQVRNGNGGGKCNIDFAKDAFDEIDRLGDCVAVALDIRKYFERLDHGRIKRVWCDLLGVEELPDDHYAVYRNITRYRTVDQREVFRRLGFFGPKFVNGQWIEGFLRPYRDVPKKLCSRQEFEEKICGKGPGAAPSLVVVNPNEYGIPQGAPISDLIANFYLMEFDTVMAAYARERRGTYMRYSDDILMILPGGRSEADAAIAFAVDEMRRHGPKLEIKEQKTCVALFRQAGDRLDFEHIPQNPDEPNKNGFEYLGFRYDGRRVYVRDSTISGFYRKVATAANSEAAKLVAANPTRGAAELIGAFDFSLFSQRFARVKRTKLTDDYRSWTFYTYLKRASRTFGLKGDRILRQASGFPEFVRSRVEEAITSRVAKRPEPKTEKAV

SEQ ID NO: 204 - protein, 427 aa, Vibrio splendidus
MRIVPKEWFRPRTYLHFDLPISLKKASIIVTDPILVAKHAFYPLIHYTIEANKIGKDPISKKVVSLPSKSRPISYPAHVDSHIYAYYSKVLNQSYEEKLKKEGLSDSILAFRSLGKSNIDFALDAFNTIKTSGECCAVALDISGFFDSLDHDILKREWCNLLQVQRLPKDHFNVFKSITKHSFVKKDELYKSLGISLNYHNYSKRRVCSPQEFREKVRGGKLIKPHSLSFGIPQGTPLSAILSNIYMFDFDIKMKEFVNVHNGKYFRYCDDMLFIVPIEYKSKVESFAMETIQSLQLSVNPKKTEIRIFRKDGEKLKADKHLQYLGFMFNGEDIFIRSSSLARYSERMRRGVRLAKKTMIKYNNIRHHNGQSERPLFKRKLYSRYTHLGKRNFITYGIRAANKMESHSIRRQLKPLFKRFNDEVNKD

SEQ ID NO: 205 - protein, 427 aa, Vibrio splendidus
MRIVPKEWFRPRTYLHFDLPISLKKASIIVTDPILVAKHAFYPLIHYTIEANKIGKDPISKKVVSLPTKSRPISYPAHVDSHIYAYYSKILNQRYEEKLKKDGLSDSILAFRSLGKSNIDFALDAFNTIKTSGECCAVALDISGFFDSLDHDILKREWCNLLQVQRLPKDHFNVFKSITKHSFVKKDELYKSLGISLNYHNYSKRRVCSPQEFREKVRGGKLIKPHKLSFGIPQGTPLSAMLSNIYMFDFDVKMKEFVNVHNGKYFRYCDDMLFIVPIEYKSKVESFAMETIQSLQLSVNPKKTEIRIFRKDGEKLKADKHLQYLGFMFNGEDIFIRSSSLARYSERMRRGVRLAKKTMIKYNNIRHHTGQSERPLFKRKLYSRYTHLGKRNFITYGIRAANKMESHSIRRQLKPLIKRFNDEINKD

SEQ ID NO: 206 - protein, 427 aa, Stutzerimonas kunmingensis
MPEKWYKSRGYLHFDRPINRATALEIVSCSKTVTQHAFYPFIRYVAQTQKVFFDKSIGKVAKKDPKQRPISYAAHVDSHIYSYYCEQLNQAYENHLAKVHWSPAVLAFRTLGKSNIDFARDAFVDIATRDSCCVIAIDIKGFFDNLDHAHLKSSWQALLGASQLPDDHYAVFRSLTKFSFVYRDQVYEALGLSKNNPKQGRKRICEPQEFRTKVRDGGLIETNKDKKGIPQGSPISALLSNVYMMGFDEQIHAYVQSCGGAYYRYCDDVLLIVPLEKEAEAKALVDQRIDAIGLEIQAAKTETCKFKLSAKGLRSDRSLQYLGFVFDGANIYLRSSSLARYQERVHRGIWLAGKCMAKVNAQRISRGQLPRSIFLKKLYKRYSYLGRRNFISYGYRAAKIMNAPSIKKQLKPHWNRLRERISDAQGE

SEQ ID NO: 207 - protein, 427 aa, Vibrio splendidus
MRIVPKEWFRPRTYLHFDLPISLKKASIIVYDPKLVAKHAFYPLIHYTIETNKIGKDPISKKVVSLPAKPRPISYPAHVDSHIYAYYSKVLNQSYEAKLKKEGLSDSILAFRSLGKSNIDFALDAFKAIKKSGECCAVALDISGFFDSLDHEILKREWCDLLQVKRLPKDHFNVFKSITNHSFVKKDELYKSLGISLNYHNHSKRRVCNPQEFREKVRGGKLINPHKLSFGIPQGTPLSAMLSNIYMFDFDMKMKQFVDIHDGQYFRYCDDMLFIVPIKYRSKVENFAMETIQSLQLSVNPKKTEIRTFRKDGEKLKADKHLQYLGFMFNGEDIFIRSSSLARYSERMRRGVRLAKKTMIKYNTIRHGNGQPERALFKRKLYSRYTHLGKRNFITYGIRAANKMESYSIRRQLKPLFKRFNDEINKD

SEQ ID NO: 208 - protein, 428 aa, Shewanella algae
MSSNYPLWYRSRGYLHFDLPVSFKKAKCLVTNPNLVSKHAFFPLISYVVESKKISKNRTTRKINVALKERPIAYSSHIDSHIYAFYADLLSEKYENKLKSAGLSECVLAFRGLRKSNIDFAHEAFQQIKAMGECSAVALDFSKFFERLDHQIIKQSWINLLGEKRLPNDHFNVFKSITKFSQVDKIELYKKLDISLNNPKKDRDRVCSVQDFRDVVRKGKLIKTNKNSFGIPQGSPISALLSNIYMFDFDSEMKRYMDIHGGKYYRYCDDMLFIVPSQLKNNVAGYAQERVKQLKVSINHKKTELRTFEYQNGVLTADQMLQYLGFMFDGENAYIRSSSLARYSEKMKRGVRLAKKTMRKYNVIRVSKGLPEKEVFKRKLYSRYTHLGGRNFITYGLRAANKMQSKTIKRQLKPLWRRFHEELGNKTK

SEQ ID NO: 209 - protein, 505 aa, Ruegeria sp.
MFRSLSRRKMEPIFSPKDLKHYPHFDRRLSIKEAEEIVSDPARVAANKFYPFFLYEETWQPFRIAEKERPEPKSRPIRYAARRDAYILTHYRRILAERYEERLSNLGVEHCPIAYRKIPKGGGGGKCNIDFAKDAFDEIEKQGDCVAIALDIKGYFENLDHERIKAVWCDLLAVDRLPPDHFTVFKNVTRYHVVDQKDVYRRLGYIETVSVNGYPRERYTVPFKKMPTQLCSPADFRAKICGGDPTIPSLVRRNADEEGNLLNHGVPQGAPISDLIANFYLLGFDVAMNQYAESRGGRYMRYSDDILLIVPGGETEADEAEAFAVGEIRKYGEELQIKEAKTCIVRFLRDNDALAFQHVRGPQGKNGFEYLGFRFDGRQVYVRDSTISRLYRKVALSAKGVARGFAKAHPKMNASEILATFNYSDFSQRFSRVHPEELSPDDYGTWTFYSYLKRASETFGARGAPILPQARNFKAIMKQRIAEAMVRAVVQRDKAAAAATEAEAE

SEQ ID NO: 210 - protein, 261 aa, Blautia sp.
MSKQIYKDKFYTHFDKKKYHTNYEQSVQNINWVSRHGFYPFIHFQMDCSKYTNDLEGNKFIKEKNRDIYYAAHIDRFIYEYYGNRLNSKYNNYMKSKGIGRVSTAYRNCSPGKCNIDFAKEVFEYIAKCESAYIFVGDFSKFFDNLDHRYLKEKIKCVVGEKSLDVADYAIYKNITKFTYVEAEDIEAEKGLFRRDMRELDKYFETDEFHDFKKKYLHKNSKDYEICVSWINILKQMNFMILKRSIFIKIVKIIRFRKVHL

SEQ ID NO: 211 - protein, 430 aa, Bacillus velezensis
MNEKKYRVKGYKHLDNKKSIEKVKSKIQNPRWVAKHGFYPFMHFEIKFQKYSRKEKKRKEKVRKIFYASHMDRYIYKYYGDKLNNHYNSVVNELGINEVATAYRNNLSGKSNINFAKEVIDFIKVQQSAYIFVADFTNFFDTLDHRYLKEKIRYVLKKDTLPNDYYNVFKNITRFSYFIKDTIESELETKYSESEIKNSYKYFTEEEFRAFKHKNIYKNSKSYGIPQGAGISSVCSNIYLLDFDEKLKKYVKEQKGLYRRYCDDLIIVIPIEGDAQDYNYQIHQKNMDDIKGQIPNLEIQPEKTGNYFYIDNQITDLDFNETKLDYLGFSFNGKEVRIREKSLFKYYTRTYRKVRICNSKSKEFGRKSYRRELYKTYSHLGKNKKGHGNFISYVERAQKIFDEDSKTINLMETQVKKHWKNIQSRLEQPE

SEQ ID NO: 212 - protein, 430 aa, Bacillus velezensis; identical to SEQ ID NO: 211

SEQ ID NO: 213 - protein, 427 aa, Aliivibrio sp.
MKILTTDWFRPRTYLHFDLPINIKKAPKIVTNPDAVSKHAFYPLIHYVIEINKIGKDPISKKVIALPPKLRPISYPAHLDSHIYSYYSKILTHYYEGKLKEHGLSDSILAFRSLGKSNIDFALDAFNEVKKVGECSAVALDVTKFFDTLDHEVLKNEWCRLLKVQKLPKDHYNVFKSITKHAHVKKVDLYKLLGISLNYHNHGKRRVCEPQEFREQVRANKLIETNSFKFGIPQGTPLSAMLSNIYMFEFDLKMKQFVDEHNGKYFRYCDDMLFIVPTEVRAKVEQFAVNQIKGLKLSVNQKKTEIRTFSRVGEKLKADSHLQYLGFMFDGEDMFIRSSSLARYSERMRRGIRLAKKTMIKYNSIRYEKGLPERELFKRKLYSRYTHLGKRNFITYGIRAANKMESESIRRQLKPLFKRFNDELNKT

SEQ ID NO: 214 - protein, 427 aa, Vibrio crassostreae
MRIVPKEWFRPRTYLHFDLPISLKKASLIVYDPNLVAKHAFYPLIHYTIEANKIGKDPISKKVVSLPTKSRPISYPAHVDSHIYAYYSKVLNQSYEAKLKKEGLSDSILAFRSLGKSNIDFALDAFKAIKKSGECCAVALDISGFFDSLDHEILKREWCDLLQVKRLPKDHFNVFKSITNHSFVKKDELYKSLGISLNYHNHSKRRVCNPQEFREKVRGGKLINPHKLSFGIPQGTPLSAMLSNIYMFDFDMKMKQFVDIHDGQYFRYCDDMLFIVPIKFRSKVENFAMETIQSLQLSVNPKKTEIRTFRRDGEKLKADKHLQYLGFMFNGEDIFIRSSSLARYSERMRRGVRLAKKTMIKYNTIRHGNGQPERALFKRKLYSRYTHLGKRNFITYGIRAANKMESYSIRRQLKPLFKRFNDEINKD

SEQ ID NO: 215 - protein, 429 aa, Stutzerimonas stutzeri
MPENWYKSRSYLHFDRPINQAAALEIVSSPKTVAKHAFYPFIRYVAQTQKVFFDKSIGKVVKKDPKERPISYAAHVDSHIYSYYCELLNQAYEDHLAKVQWSPAILAFRALGKSNINFAREAFLDIATRDSCCVIAIDIKGFFDNLDHGHLKSAWQTLLGTSQLSDDHYAVYRSLTKFSFVYRGQVYETLGLSKNTPKQGRKRICEPHEFRTKVRDGGLIETNKDKKGIPQGSPISALLSNVYMMGFDEQIHTYVQTCGGAYYRYCDDVLLIVPLEKEAEAKVLVDQRVNAIGLEIQTSKTETCKFKLSAKGLRSDRPLQYLGFIFDGANIYLRSSSLTRYQDRVKKGIWMAEQCMEKVNAKRMSRGQLPRSMFLKKLYKRYSYLGRRNFISYGYRAARIMNAPSIKKQLKPHWNRLRERISDAQGARH

SEQ ID NO: 216 - protein, 426 aa, Colwellia sp.
MKFTKPHPWFRSRGYLHFDRPISFDTAKKIVTSPKKVASHSFYPLINYSVETKKIKQDKKTRAIETKLKERPISYSSHVDSHIYGYYANLLSSLYEKELSIRGLSDNVLAFRSLGKSNIEFAHEAFLSISDFGECGVVALDLSKFFDKLDHAILKEQWANLLGATKLSPDHFNVFKSLTKFSIVDKLELYGLLDISSNNPKNGRVRVCEPNDFRNKVRGSGLIKPNVHNYGIPQGSPISALLSNIYMIDFDSKMKAYVEKFNGKYFRYCDDMLFIVPIKERDKVAGDARLAIKDLKVDINVNKTELRTFKMNDDGVLHSEQPLQYLGFLFDGVNIYLRSTSLARYSERMRKGVRLAKATMRKRNHLKLERGDETKSLFKNKLYRKYSHLGSRNFVTYGLRAAKIMNSKTIKSQLKPLWKKLNDEME

SEQ ID NO: 217 - protein, 155 aa, Oxalobacteraceae bacterium
MRDPDAVARNSFYPFMRFEEKWQPFRDKQGGKPDKKIRQLRFASRRDAYIYSYYRHILRTPYEAALAARGLGDNVIAYRKLATPEGKGKSNINFALDAFNVIRAYGDAAVVTLDISKYFESIDHELLRQKWCGLLGVAELPRDHAAVFRAITRYA

SEQ ID NO: 218 - protein, 426 aa, Pseudoalteromonas sp.
MDDNHPSWYRRRGYLHFDLPIGTKKAISLTSNPSFVKKHSFYPLINYEVSSKKINKDKLSGKLLVKNKMRPIAYSSHVDSHIYAFYAEKLSELYEGTLKDNGLDKSVLAFRNLGKSNIDFAYEAFLKIKEMGECSAVALDFSKFFDTLDHNLLKKSWCKLLGQEKLPPDHFNVFKSITKFSTVDKLELYKLFSISKNKPRNQHKRICSSEDFRTKVRAEGLIKPNLCGYGIPQGSPISALLSNIYMLDFDLEMKKYADIHGGYYFRYCDDMLFIMPKRLKNKVAGFAQKHISKLKVRINPDKTEIRQFNKVGNILKADNTLQYLGFIFDGENIYLRSSSLARYSEKMRRGVSLAKQTMRKYNDIRAMKGADEKALYKKKLYSRYTHLGGRNFITYGLRAANKMESNTIKKQLKPLWRRFHEELDKD

SEQ ID NO: 219 - protein, 426 aa, Pseudoalteromonas aurantia
MPKVTPSSEWFRSRSYLHFDQPIGEKKALKLVTSFKRVKEHSFYPLISYEVTSKKLKKDASGKLNVTLKERPIAYSAHKDGHIYAYYAQILSKLYEEQLLKYGLEGCVLAFRSLGKSNIDFAHEAFTQIKESGECSAVALDFSKFFDTLDHSILKQSWCSLLDVQRLPDDHFNVFKSITKFSKVDRTQLYKKMSISINNPKNGRIKVCKAKDFRELVRGGGLIFTNKNNYGIPQGSPISALLSNIYMLEFDKAMKTYVDIHGGYYYRYCDDMLFIVPTALKKKVAGFAAKEVKKLKVALNPDKTELRTFRKVANVLSSDQPLQYLGFIFDGENAFIRSSSLARYSEKMRRGVNLAKQTMNKYNNIRSGLKLDEKDLYKKKLYSRYTHLGGRNFVTYGLRAARKMDSKSIRKQLKPLWRRFHEEMQK

SEQ ID NO: 220 - protein, 431 aa, Cytobacillus solani
MNKKKYRVKGYKHLDNKKSIEKVKGKIQNPQWVAEHGFYPLMHFEIKFQKYSRKEKQPKEKVRKIFYASHIDSFIYKYYGDKLNNHYNSVVDELDIKEVATAYRNNLSGKSNINFAKEVIDFIKAQQSAYIFVADFTNFFDTLDHRYLKEKIRYVLKKDTLPDDYYNVFKNITRFSYFIKDTIEAELMTKYTESEIKNSYKYFTEEEFRAFKHKNIYKNSKRYGIPQGAGISSVCSNIYLLDFDEKIQKYVKEQKGLYRRYCDDLIIVIPIEGDVQGYDYQIHQKIVGEIKEQVPNLEIQPEKTGNYFYSNNKITDLEFNDTKLDYLGFSFNGKEVRIREKSLFKYYTRTYRKIRICNRKSKEFGRKSYRRELYKNYSHFGKNKKGHGNFLSYAERAQKIFDEDSKTLNLMETQVKKHWKNIQSRLENPKP

SEQ ID NO: 221 - protein, 247 aa, Bradyrhizobium daqingense
MDTWKIASENLKRYPHFDAQLSIAAATKLATDPKAVASHTFYPFLLYSDRWTRFAPLGKQGDVKLRPIRYSARGDAYIFSYYRHVLSRAYEAALASNALSDSILAYRRIMDEDGKGKCNIHFARDAFDTISKLGNCCVVALDISGFFESLDHDRLKAAWCELLGVKKLPEDHFRVFRAITRYTVVEKQAVYERLGYFGPKPSSKSGKPSSGYLVSYKDMPKQLCSGLEFRQKIAGGGTARRVLSMSI

SEQ ID NO: 222 - protein, 427 aa, Pseudomonas profundi
MSENWYKSRSYLHFDRPINQAAAREIVSNCKTVAQHAFYPFIRYVAKTQKVFFDKSVGRVVRKDPKERPISYAAHVDSHIYSYYCERLNQAYEAHLAKATFSSAVLAFRSLGKSNIEFARDAFLDITARESCCVIAIDIKGFFDNLDHAHLKTAWQTLLGSSRLPEDHYAVYRSLTKYSFVYREKVYDILGLSKNNPKQGRKRICEPHEFRDMVRDGGLIETNKVKKGIPQGSPISALLSNVYMMGFDGQIHGYAQSCGGAYYRYCDDVLLIVPLAKEIEAKILIEQRVNAIGLEIQEAKTETCKFTRSAKGLSTDRPLQYLGFVFDGTNIHLRSSSLARYQDRVNKGVRLAGKRMDKVNAKRTARGQSPRPMFLKKLYKRYSYLGRRNFISYGYRAAKTMNSSSIKKQLKPHWERLRERICEVQGE

SEQ ID NO: 223 - protein, 491 aa, Pseudooceanicola albus
MEDEFDFTAKDLKHYPHFDAPITLKEIRRLVTDPQRVAANSFYPFFLYEESWQPYRSTDAAKPDKKTRPIRYGARRDAYIFAFYRRKLSRLYEARLRDMGIEDCPIAYRQVLRPGRGGGKCNIDFAKDAFDEIDRLGDCVAVALDVKGYFENLDHKRIKSIWCDLLGVEELPPDHYAVFKNITKYRYVDQRSVYSRLGYFGMRERNGHMIPGFLMPFRDMPKQLCSNADFRAKICGGDPKHGPSLVQKNVLPHGVPQGAPISDLIANFYMLEFDAVMAEYARARGGRYMRYSDDILLILPGGSPEARAAIDFATAEMRKHGPELRIKDAKTCVAQFQRAPDGLRFHHLKQRPDEAAKNGFEYLGFRYDGRRVYVRDSTISRFYGKVAGAAKRDGRRHVESNPAMDAGTLIGSFDYPLFSQRFSKVKKSNLTSDYRSWTFYSYLKRSAEAFGPKGDRILRQARGFDEFMKDRVRLAIVSGVAKRKPPVPETT

SEQ ID NO: 224 - protein, 427 aa, Pseudomonas nitroreducens
MPENWYKSRGYLHFDRPINQAAALEIVSSSKTVAKHAFYPFIRYVAQTQKVFFDKNIGKVVKKEPKQRPISYAAHVDSHIYSYYCELLNRAYEDHLAKVRWSSAILAFRALGKSNIHFARDAFLDIATRDSCCIIAIDIKGFFDNLDHAHLKNAWQALLGGSQLPDDHYAVYRSLTKYSFVYRDQVYEALGLSKNNPKQGRKRICEPHEFRAKVREGGLIETNKDKKGIPQGSPISAMLSNVYMMGFDELIHAYVQSCGGAYYRYCDDVLLIVPLEKETEAKALVDLRVNAIGLEIQAAKTETCKFTRSAKGLRTDRPLQYLGFIFDGANIYLRSSSLSRYQDRVNRGIGLAGKCMDKVNAKRIARGQLPRSMFLKKLYKRYSYLGRRNFISYGYRAARIMGSPSIKKQLKPHWSRLRERISHAQGE

SEQ ID NO: 225 - protein, 427 aa, Shewanella sp.
MLKETPKWYRNRGYLHFDQPINQAKATKLVTSPFQVAKHPFFPLISYVVLSKKISKNPSTGMLNVVKKDRPIAYSAHKDSHIYAYYAEMLSVKYEEELTKNNLQDSILAFRELGKSNIDFAYEAFCKIKNFGQCSAVALDFSKFFDTLDHDLLKISWAHLLGVKKLPSDHFNVYKSLTKFSKVDKDKLYEALSISKSNPKNCRLRVCDASEFRSRVRDKGFIETNNNSYGIPQGSPISALLSNIYMLEFDKEMKRYVDIHGGHYYRYCDDMLFIVPTKLRDNVAEFADKHVKALKVNINTKKTEIRTFRKIGDTLVSDQMLQYLGFMFDGENIYIRSSSLARYSEKMKRGISLAKQTMRKYNDIRAEKGATEKELFKKKLYSRYTHLGAKNFVTYGLRAANKMGNSKTIRRQLKPLWRRFHEELDKD

SEQ ID NO: 226 - protein, 427 aa, Pseudomonas ceruminis
MPENWYKSRGYLHFDRPINQAAALEIVSNPKTVAKHAFYPFIRYVAQTQKVFFDKSIGKVVKKAPKQRPISYAAHVDSHIYSYYCDLLNQAYEGHLAKVRWASAILAFRALGKSNIDFARDAFLDIAARKSCCVIAIDIKGFFDNLDHTHLKNAWQAILDTSHLPDDHYAVFRSLTKYSFVYRDQVYEALGLSKNNPKQGRKRICEPHEFRTKVRDGGLIETNRDKKGIPQGSPISALLSNVYMMGFDEQIHAYVQSCGGSYYRYCDDVLLIVPLEKEAEAKALVDLRVNEIGLEIQTAKTETCKFTRSVKGLRSDRPLQYLGFIFDGANIYLRSSSLARYQDRVNRGIWLAGKCMDKVNAKRIARGQLPRSMFLKKLYKRYSYLGRRNFISYGYRAARAMNAPSIKKQLKPHWNRLRERISDAQGE

SEQ ID NO: 227 - protein, 426 aa, Pseudoalteromonas sp.
MDDDTPSWYRSRGYLHFDVPVGKKKAIHITTNPNYIKRHSFYPFINYAVSSKKINKDKSTGKILVKNKERPIAYSSHLDSHIYAFYSEKLNALYEDKLLEYGLEKSVLAFRSLGKSNIDFAYEAFIKIKEMGECCAVALDFSKFFDTLNHDLLKKSWCKLINKEKLPSDHFNVFKSITKFSTVDKMDLYELFSISKSNPKVKHKQICCAKDFRNKVRGGGLIKSNLNDYGIPQGSPISALLSNIYMLDFDLEMKKYADIHGGYYFRYCDDMLFIMPKRLKKNVAGFAEKHIKKLKVHINPQKTEIRQFNKVGNTLEADSPLQYLGFIFDGENIYLRSSSLARYSEKMRRGVSLAKQTMRKYNNIRAMKGADEKDLYKKKLYSRYTHLGGRNFITYGLRAANKMNSNTIKKQLKPLWRRFHEEIEKD

SEQ ID NO: 228 - protein, 427 aa, Pseudomonas vanderleydeniana
MPENWYKSRGYLHFDRPINQSAALEIVSSPKSVAKHAFYPFIRYVAQTQKVFFDKSIGKVVKKDPKQRPISYAAHVDSHIYSYYCDLLNQAYEDHLAKVPWSSAVLAFRALKKSNIDFALDAFLDVAARESCCVIAIDIKGFFDNLDHAHLKIAWQALLGTSHLPNDHYAVYRSLTKYSFVYRDQVYEALGLSKNNPKHGRKRICEPHEFRSQVRDCGLVETNQGKKGIPQGSPISAMLSNVYMMGFDEQIHTYVESCGGAYYRYCDDVLLIVPLEKEAEAKALVDLRVNEIGLEIQTAKTETCKFTRSARGLRTDRPLQYLGFIFDGANIYLRSSSLARYQDRVNRGIWLAGKCMDKVNAKRIARGRLPRSMFLKKLYKRYSYLGRRNFISYGYRAARIMGSSSIKKQLKPHWNRLRERISDAQGE

SEQ ID NO: 229 - protein, 427 aa, Pseudomonas taiwanensis
MPENWYKSRGYLHFDRPINQAAALEIVSNPKTVSKHAFYPFIRYVAQTQKVFFDKSIGKVAKKDPKQRPISYAAHVDSHIYSYYCELLNQAYEDRLAKVPWSSAILAFRALGKSNIDFARDAFLDIAVRDSCCVIAIDIKGFFDNLDHAYLKSAWQALLGTSQLPDDHHAVYRSLTKFSFVYRDHVYEALGLSKNNPKQGHKRICEPHEFRAKVRNGRLIETNKETKGIPQGSPISALLSNVYMMGFDEQIHAYVQSCGGAYYRYCDDVLLIVPLEKEAEAKALVDLRVNAIGLEIQAAKTETCKFTRSTKGLRSDRPLQYLGFIFDGANIYLRSSSLSRYQDRVNRGIGLAGKCMDKVNAKRIARGQLPRSMFLKKLYKRYSYLGRRNFISYGYRAARIMGSPSIKKQLKPHWNRLRERISNTQGE

SEQ ID NO: 230 - protein, 426 aa, Pseudoalteromonas sp.
MDDDTPSWYRSRGYLHFDVPVGKKKAIHITTNPNYIKRHSFYPFINYAVSSKKINKDKSTGKILVKNKERPIAYSSHLDSHIYAFYSEKLNALYEDKLLEYGLEKSVLAFRSLGKSNIDFAYEAFIKIKEMGECCAVALDFSKFFDTLNHDLLKKSWCKLINKEKLPSDHFNVFKSITKFSTVDKMDLYELFSISKSNPKIKHKQICCAKDFRNKVRDGGLIKSNLNDYGIPQGSPISALLSNIYMLDFDLEMKKYADIHGGYYFRYCDDMLFIMPKRLKKNVAGFAEKHIKKLKVHINPQKTEIRQFNKVGNTLEADSPLQYLGFIFDGENIYLRSSSLARYSEKMRRGVSLAKQTMRKYNNIRAMKGADEKDLYKKKLYSRYTHLGGRNFITYGLRAANKMNSNTIKKQLKPLWRRFHEEIEKD

SEQ ID NO: 231 - protein, 425 aa, Zobellella iuensis
MSSSKPPWYRSRSYLHFYLPVSFKKARNLVTNPELVSKHAFFPLINYAVESKKIKKDKKTHKIDMAVKERPIAYSAHIDSHIYAYYASLLSKKYEIQLKAAGLTDCILAFRGLGKSNIDFACEAFEQIKIMGECSAVALDFSKFFDTLDHSILKESWANLLVEAKLPADHFNVFKSITQFSQVNKIELYKEFSISLNNPKNGRKRVCSAKEFREVVREKKLIKTNKAPFGIPQGSPISALLSNIYMFEFDAEMKRYMDIHGGKYYRYCDDMLFIVPAPLRDSVAGFAQERVKQLKVSINTNKTELRTFTYQNGVLTADQMLQYLGFMFDGENVYIRSSSLARYSEKMKRGVRLAKKTMDKYNAVRTSKGLPEKGLYKRKLYSRYTHLGGRNFVTYGLRAANKMKSKTIKRQLKPLWRRFHEELDK

SEQ ID NO: 232 - protein, 425 aa, Parahaliea mediterranea
MSTDDCQWYRNRRYLHFDHPIGVKAARELVTNPLRVQSHSFYPLITYELDSVKIFKDRASGLIDKKIKKRPIMYAAHADSHIYSYYADLLSKEYEAALLASGLSGNILAFRPLGKSNIDFAAQAFNDIRLMGNCAAVALDVTAFFDNLDHEILKDAWCGLIGEPRLPPDHYAVYKAITKFSKVSKLEVYDKLGISTHNPKNNRTRICEPAEFRNVVRAGGLISANTDSFAIPQGSPISALLSNIYMFAFDEWSADLAASLGGEYYRYCDDILFIVPVSEKDRVANKARKKIRRLELEINKEKVEIRTFKVIKGRQASDKPLQYLGFTYDGERILIRSAALARYSEKMKRGVKFAKATMRKRNRLRDARGEPTKPLYRKNLYRLYSHTGRRNFLRYGYRAAEKMNSPAIRKQLKPLWERLQEEIER

SEQ ID NO: 233 - protein, 427 aa, Pseudomonas sp.
MPENWYKSRAYLHFDRPINQAAALELVSSPKTVAKHAFYPFIRYVAQTQKVFFDKKIGKVVKKDPKQRPISYAAHVDSHIYSYYCELLNRAYEDHLARMQWSSAILAFRALGKSNIDFARDAFLDIAMRDSCCVIAIDIKGFFDNLDHAHLKNAWQSLLGSSQLPDDHYAVYRSLTKFSFVHRNQVYETLGLSKSNPKQGRKRICEPHEFRVMVRQGGLIETNKDVKGIPQGSPISAMLSNVYMMGFDEQIHAYVQSCGGAYYRYCDDVLLIVPLEKETEAKTLVDLRVSEIALEIQTTKTETCKFKQSPKGLKSDRPLQYLGFTFDGANIYLRSSSLARYQDRVHRGIWLAEKCMGKINAKRISRGQLPRSMFLKKLYKRYSYLGRRNFISYGYRAARIMGAPSIKKQLKPHWSRLRERISDAQGE

SEQ ID NO: 234 - protein, 431 aa, Bacillus subtilis
MNEKKYRVKGYKHLDNKKSIEKVKGKIQNPRWVAKHGFYPFMHFEIKFQKYSRKEKKPKEKVRKIFYASHMDSYIYKYYGDKLNNHYNSVVDKLGINEVATAYRNNLSGKSNINFAKEVIDFIKVQQSAYIFVADFTNFFDTLDHRYLKEKIRYVLKKDTLPDDYYNVFKNITRFSYFIKDTIESELKNKYTESEIKNSYKYFTEEEFRSFKHKNIYKNSKSYGIPQGAGISSVCSNIYLLDFDEKVQKYVKEQKGLYRRYCDDLIIVIPIEGDVQDYNYQIHQKIMDDIKKQIPNLEIQPEKTGNYFYTDNQITDLDFNETKLDYLGFSFNGKEVRIREKSLFKYYTRTYRKVRICNRKSKKFGRKSYRRELYKIYSHLGKNKKGHGNFISYAERAQKIFDTNTNTVNLMETQVKNHWKRIKSRLENPNK

SEQ ID NO: 235 - protein, 425 aa, Oceanimonas baumannii
MTLKTPAWYRRRGYLHFDLPISLKKATNLVTNPSLVEKHAFFPFISYSVESKKIRKDKATGKVTVKSKERPIAYSSHVDSHIYAYYAEILSNKYERILKYFDLVDNVLAFRGLGKSNIDFAFEAFEQIKNMGSCSAVALDLSKFFDTVDHSLLKMNWANLLGEDKLPADHFNVFKSLTRHSKVDKLKLYEQFDISTNNPKNGRRRVCSIKGFRDVVRKNNLIVVNEDAKGIPQGSPISALLSNIYMLDFDVEMKRYMDIHGGRYYRYCDDMLFIVPTQIRDKVAGHAQREIRKLNLSINSDKTELRTFSLKGGLLRSDKTLQYLGFVFDGESIYIRSSSLARQSEKMKRGVRLAKNTMRKYNEIRKEKGLPERELYKRKLYSRYTHLGGRNFITYGLRAAKKMNSKTIKKQLKPLWRRFNEELDK

SEQ ID NO: 236 - protein, 427 aa, Vibrio kanaloae
MSSNIPLWYRSRGYLHFDLPISLKKARNLVSNPDLVSKHAFFPLINYAVESKKISKNKKTRKIDIAVKERPIAYSAHVDSHIYAYYANLLSRKYESRLKSAGLSDCILAFRGLGKSNIDFAFEAFEQIKKMGECSAVALDFSKFFDTLDHSLLKQSWANLLGEEKLPPDHFNVFKSITKFSQVNKVDLYKELGISPNNPKNGRTRVCTAQEFRDVVRKKKLIKPNKKSFGVPQGSPISALLSNIYMFEFDAEMKKYMDIHGGKYYRYCDDMLFIVPAPLRDKVAGFAQERVKSLEVTINTKKTELRTFKYQNDVLVADQMLQYLGFMFDGENAYIRSSSLARYSEKMKRGIRLAKRTMDKYNAVRLTKGLPEKDLYKRKLYSRYTHLGGRNFVTYGLRAARTMQSKTIKRQLKPLWRRFHEELERET

SEQ ID NO: 237 - protein, 425 aa, Klebsiella aerogenes
MNNDDYPWFRKRGYLHFDEPVSLKKAVKYVSSPEKITKHSFLPFLSFEVKSFKIKKDKLTKQLSKTEKLRPIAYSSHLDSHIYAFYAEYLTGHYELLIQENNLHENILAFRSLNKSNIEFAKRAFDTITEMGECSAVALDLSGFFDNLDHQILKHQWCKVIGTEALPQDHFAIYKSITRYSKVDKNRAYEILGISKNNPKYNRRKICTPVDFRNKIRKNDLIIVNKAKKGIPQGSPISALLSNIYMLDFDIEMRYYAQELGGHYYRYCDDMLFIVPTKYNKTLAGDVAQRIKHLKVELNTKKTEIRDFIYKDNTLVANMPLQYLGFIFDGSNIFLRSSSLARYSERMKRGVRLAKATMDSKNRIRANKGETLKPLFKKKLYARYSHIGRRNFLTYGYRAAKIMNSKAIKRQLKPLQKRLQNEILK

SEQ ID NO: 238 - protein, 424 aa, Aeromonas jandaei
MNSENQWFRSRGYLHFDSPVKLRKACQIVKSPLNVAQHAFFPLIKYNIKSLKISIDKDGNVQKKIKTRPISYASHIDSHIYSYYAELLSDLYEKALSESQLEESVLAFRSLGKSNIDFANIAFEKIKAHGDCTAIAMDISGFFDNLDHEILKSMWCKLLQEHSLPNDHFNIYRSLTKSSVVNRDLLYTALNISRNNPKAAGLRLCNIKTFREKVRGLGLIETNSTGRGIPQGTSISALLSNIYMLDFDKKIKDIVTSISGEYYRYCDDMLFIINSDKTSELISLVTQSISELKIEINDKKTEIRTFHTYRGVQKCDKPLQYLGFIFDGERKLLRSAALARFSGRMKAGVRLAKKTHQKANLIEEKNGVAKTPLFKKKIYERYSHLSKRNFITYGHKAANIMGSNAIKKQLKPLWGRLLKEMNEQ

SEQ ID NO: 239 - protein, 429 aa, Enterobacter hormaechei
MESREHPWFRKRGYLHFDKPISIEHALDIVTNPRAVAAHSFLPFITFTSTTYKVQKDKGTNAINKTLKERPIAYSSHVDSHIYSYYAATLNELYENALQIHGISKNVLAFRSLHKSNIEFAYDAFQEIKKRGECSAVALDLSKFFDTLDHSFLKDAWCRLLSTDKLPEDHYAVFKAITKYSKVDKEKVYDLMDIPKNNAKYTKKTRKQICSFADFRDKVRKNALIISNKANFGIPQGSPISALLSNIYMLNFDIEMKDYVETLGGEYFRYCDDMLFIVPQSAKNNVAGEAEKRLNKLKVSLNTKKTEIREFSFVSKKIKCDKPLQYLGFVFDGQNIFLRSSSLSRYSDRMKRGVRLAKATMKRKNNIRKHKGLAKKELFKEKIYARYAHVGKRNFLTYGYRASRIMKSNSIRKQLKPLWERLQKEINRS

SEQ ID NO: 240 - protein, 424 aa, Pantoea ananatis
MLEKDNPWYRRRGYLHFDQPISLDKAFKIVSNPETVSKHSFFPFINFEVKSFKIKKDKISNKLVKDEKIRHIAYSSHIDSHIYSYYAAYLSELYELQIKEYNLNDTVLAFRSLEKSNIHFAKNAFDRIRSKGECTAVALDLKGFFDNIDHETLKDRWMKIIGTDTLPRDHFSVYKSITKYASVKKEDLYKTLNISKHNPKFCRDKVCSTIEFREIVRKNGLITTNKNKIGIPQGSPISALLSNIYMLNFDIDMNIYANSIGGHYYRYCDDMLFIVPSDRKKDVADIANQHLHELKVNLNTKKTEIRDFTFSGSRLIADQPLQYLGFIFDGENIYLRSSSLARYSERMRRGVKLAKSTMACRNKIRISKGEKIKPLFKKKIISRYSHFGKRNFLSYGFRAAEIMDSKTIRKQLKPLWKRLLNEIG

SEQ ID NO: 241 - protein, 445 aa, Klebsiella pneumoniae
MTAVRNRPGFTIIENPLMVYREHSWFRKRGYLHFDKPISEEHALNIVTDPYAVATHSFLPFITFTSTTFKVQKDKGTNAINKTIKERPIAYSSHVDSHIYSYYASILNELYEEELKKNNITDNVLAFRALNKSNIEFAYDAFQEIKKRGNCSAVALDLSKFFDTLDHSFLKKSWCQLLTAEKLPEDHYAVFKAITKFSKVDKNEVYELMGLPKNNAKHTKKTRKQICSFEDFRNKVRQSNLIIPNKANFGIPQGSPISALLSNIYMLNFDTEMKQYVSSLGGAYFRYCDDMLFIVPTHEKNNVAGEAEKRLFKLKVSLNIKKTEIRDFFVTPNKIKCDKPLQYLGFIFDGHNIFLRSSSLSRYSDRMKRGVRLAKATMKSKNKLRNSKGLPNKELFKEKVYARYAHVGKRNFLTYGYRASRIMHSNSIRKQLKPLWERLQKEIHR

SEQ ID NO: 242 - protein, 428 aa, Collimonas humicola
MSNRKHPWFRHRGYPHFDHPISFREAKRIVKDPEQVARHSFYPFVEFSIQTFKVKRNKITDKVERVGKTRPIAYASHVDCHIYSYYAFRISKLYEKWIRSNNLDESVLAFRSLGKSNVHFAANAFDAIRKLGNCYVVALDITGFFDNLDHKILKNSWADVLDESALPPDHYAVFKSLTKFATVNKGALYEALGISLNNHKSSPKRLCTPEEFRETVRKNNSLVKRNAEAKGIPQGSPISALLSNIYMRQFDIELHSFASNCGGFYFRYCDDILLIVPPVRKDDVEGFAMDEIAKLNLPINPTKTDRVSFEVSADGQLKGSKPLQYLGFLFDGQRVILRSASLARYSEKMRRGVRIAKATMAKRNSARIVRGDEVKPLFRRKLNSRYTYLGRRNFITYGYAAARVMDSQAIRKQLRGLWQRLNDEIDND

SEQ ID NO: 243 - protein, 443 aa, Rheinheimera oceanensis
MVKKHDWYRMRGYIHFDAPIGLKKATAIVTNTNSVATHAFFPLVHYTIESFKVVKNDQGEVEKKVKQRPIAYAGHLDSHIYSYYSRLLSAKYEVALKERGLDKNVIAFRALGKSNINFANDAFEEIKKRRSCSAIALDITGFFDNLDHQILKEHWCYLLGADKLPNDHFNVFRSITRFSKVCRDTVYERLKIAKNNPKNGRFKICEPEVFRRVIRADKLIQVNADSKGVPQGSPISALLSNIYMLTFDVAAKNIAEQYDGCYYRYCDDMLFIVPTAYKDLVEKAVMAEIAKVKLDINPKKTEIRDFWPFGSVMQSNKPLQYLGFIFDGQHKLIRSAALAKFSGRMKSGVRLAKKTQRKANYREIIAGKEVTRLFKHKLYERYSHLSNRNFVTYGYRAAKIMQSQAIRKQLKPLWGRLQKEIVDDNPLFNMTLSDMLFSTHKQP

SEQ ID NO: 244 - protein, 469 aa, Polymorphobacter sp.
MGSQVKALSHFDKSIRLVDINKLVADPIAVARNSFYPFMRFEERWQPFRGQEGGKPDKDKRQLRFASRRDAYIYSYYRNILREPYEAALAARGLAESVIAYRKLTTAGGKGKSNIDFALDAFNVIREFGNAAVVTLDISKFFESIDHALLVQKWCGILGVTKLPHDHLAVSKAITRYSIVDRDAAYERLGYLAWQAKGLSRIPIYTTGFKDMPRQLCTNKDFREKICGKNGKFNSLVEVNKNDFGIPQGSPISDMLANIYLIDFDSAIKEYVNNIGGVFFRYSDDIIIIIPGSESAALAARDFAISEITKHGSRIVIKASKTSVLKYFPVDGGQSFAKLHGDLGKNGLEYLGFRYDGKAAYLRDATLSRLYRKVSRSLRAEARALVRRYPGKDKAYVEDRFDAPKFLQRYGRVSDFDPSATYDSWTFWTYAKRAIDAFGPLGHTIGHQLANYGLIVRTRMKTEIANILL

SEQ ID NO: 245 - protein, 430 aa, Bacillus atrophaeus
MNEKKYRVKGYKHLDNKKSIEKVKGKIQNPRWVAKHGFYPFMHFQIKFQKYSRKEKKPKEKVRKIFYASHMDSYIYKYYGDKLNNHYNSVVDKLGINEVATAYRNNLSGKSNINFAKEVIDFIKVQQSAYIFVADFTNFFDTLDHRYLKEKIRYVLKKDTLPDDYYNVFKNITRFSYFIKDTIESELKKKYTESEIKNSYKYFTEEEFRSFKHKNIYKNSKSYGIPQGAGISSVCSNIYLLDFDEKLQKYVKGQKGLYRRYCDDLIIVIPIEGDVQDYNYKIHQKIMDDIKEQIPNLEIQPEKTGNYFYTDNQITDLDFNVTKLDYLGFSFNGKEVRIREKSLFKYYTRTYRKVRICNRKSKKFGRKSYRRELYKNYSHLGKSKKGHGNFISYVERAQKIFDEDSKTINLMETQVKKHWKNIQSRLEQPE

SEQ ID NO: 246 - protein, 362 aa, Phycisphaeraceae bacterium
MSSELGAKGKASFQHAAEAFKAIVTTGECDAVAMDIEKFFDSIPHTALKRSWAKLLNKPSLPADDYAVFKAVTEFATVPLAQVRKARGLGKRRFAKERSIAMTSEEFDREIRKRGLINVNRAEMGIPQGLPISGLLANIVMFEIDEVMVKAAAAEGGSYRRYSDDILIIAPRGRAADLEAVFKKQLALLPLSVQDSKTSRVRFRKRSSGSLVAVSMDSHGQEGNAGVALQYLGLEFDGQNVLIRPQTLVKFGKRMRRSVDRARRAALRSMRRGGPAKINRRDLYARYSHLRPHPETPPKRRPRGSFMNYASHAADAVAEIGGDTSIDQRIRIQLRGQWSLLQRLIANAEKSLSAPIPKKSKP

SEQ ID NO: 247 - protein, 429 aa, Enterobacter roggenkampii
MESREHPWFRKRGYLHFDKPISIEHALDIVTNPRAVAAHSFLPFITFTSTTYKVQKDKGTNAINKTLKERPIAYSSHVDSHIYSYYAATLNELYENALQIHGISKNVLAFRSLHKSNIEFAYDAFQEIKKRGECSAVALDLSKFFDTLDHSFLKDAWCRLLSTDKLPEDHYAVFKAITKYSKVDKEKVYDLMDIPKNNAKYTKKTRKQICSFADFRDKVRKNALIISNKANFGIPQGSPISALLSNIYMLNFDIEMKDYVATLGGEYFRYCDDMLFIVPQSAKNNVAGEAEKRLNKLKVSLNTKKTEIREFSFSSKKLKCDKPLQYLGFVFDGQNIFLRSSSLSRYSDRMKRGVRLAKATMKRKNNIRKHKGLAKKELFKEKIYARYAHVGKRNFLTYGYRASRIMKSNSIRKQLKPLWERLQKEINRS

SEQ ID NO: 248 - protein, 189 aa, Klebsiella michiganensis
MSALLSNIYMLNFDTEMKQYVSSLGGAYFRYCDDMLFIVPTHEKNNVAGEAEKRLFKLKVSLNIKKTEIRDFFVTPNKIKCDKPLQYLGFIFDGHNIFLRSSSLSRYSDRMKRGVRLAKATMKSKNKLRNSKGLPNKELFKEKVYARYAHVGKRNFLTYGYRASRIMHSNSIRKQLKPLWERLQKEIHR

SEQ ID NO: 249 - protein, 423 aa, Paraburkholderia tagetis
MENPAEWYRRRTYLHFDMPISEKAACAIAGNPAVVTRHAFYPFITFTIKTQKVKWDSVSKKLSLIPKERPVSYASHVDSHIYAYYAALLSEKYENRLKSAAFEPAVLAFRKLGKSNIHFAKDAFSAIKQLGNADVITTDIRDFFGNLDHQILKSAWKSLLGVDALPDDHYNVFKSLTRFSWVEKRNLYAALHISLNNPRASGPRVCEPEDFRKIVRGCKLINRNPHSKGIPQGSPISALLSNIYMVNFDEMMWNAVTAWGGKYFRYCDDMLIIAPQGKGKDLLKLAQEFSDLHKLPLHPDKTEERTFTMTVDGLVADKPLQYLGFLFDGKRIILRSASLARYSDRMKRGVRLAKATMRRRNDLRVTRGETPITLRKRKLYKRYSYLGRRNFVSYALRAAGILEAQAIKRQVKPLWKRLRKQMG

SEQ ID NO: 250 - protein, 436 aa, Vibrio furnissii
MTKDLIPAWYTKRHYLHFDEPISASKAEKIATDKATVAKHAFFPFISYTFELTKLDRDTSSGKLYQKPKPREVAYSSHIDSHIYAYFASLLSEQYEIKVAELGLQDSVLAFRKLGGKNNIHFANDAFNDIKAMGTCSVIALDFSKFFDTLDHQILKQQWCNLLGFSKLPKDHYNVFRSLTKFSKVDRNPLFELFDISQYTPKSNGRTRVCSPEEFRNEVRGKGLIQPNPYGDKGIPQGSPISALLSNIYMLSFDEQMQNYVNSVNGKYFRYCDDMLFIVPSEHRDIVEKLAKNKVAALKVQINSKKTEIRDFKIHNERLSSFDEHGKQKPLQYLGFLFDGHSIFLRSTALARYSEKMKGGVKLAKKTMEKENRIRKEKGEPEQTQLYKRKLHRLYSYRGKRNFLSYGYRASKIMNSKSIKKQLKPLWKRLKDEIDK

SEQ ID NO: 251 - protein, 433 aa, Vibrio parahaemolyticus
MSAPLWYTKRNYLHFDVPVSGTKAEKIVTSTTSVARHAFFPFISYSFQLTKLDRDTSTGKLYRKPKPREVAYSSHIDSHIYAYYANQLSNLYEQKVEKSGLHEAVLAFRKLDGKSNIHFADDAFNYIRKMKECSVIALDFSKFFNTLDHRILKEEWSKLLQVKHLPKDHYNVFRSLTKFSTVDRDELFKTFGISQYNQKANGRNRVCTPLEFREKVRGSGLIKPNPNGSMGIPQGSPISALLSNIYMFSFDKHMKNYVDSIGGKYFRYCDDMLFIVPSEYRDTVEKLANSKIAALKVQINSDKTEIRDFKFHNGQLLSFDEFGKQKPLQYLGFLFDGHSIFLRSTALARYSEKMKGGVKLAKKTMEKENRIRKSKGEPEQNQLYKRKLHRLYSYRGRRNFLSYGYRAAKIMNSKSIKRQLKPLWQRLQDEISK

SEQ ID NO: 252 - protein, 472 aa, Ruminococcus sp.
MPRKKTRSVSLGMLSSVLTDFAIYEVIFMCDSASWLCLEETIKKSQKNYAHFDLRTDISKCGKYISNQVLVAKHGFYPFIHYTKETVKYNKREGRKIKIRDICYAAHIDRCIYQMYSHIINDMYNKELKKRGIDYVPVAYRTNLGVSNVELAKRAFDFIKESKTCFVMIGDFTSFFDNLDHKYLKERWCNLLGTDLLPDDHYAVFKNITKFSKWELSDIYEINGLEENKYSWKKLNSMSRVLTTKQFHEYHSHIIKNKNPYGIPQGSPISAVLANLYMIDIDKSIYDIVCSYNGLYMRYSDDFIIVVPQTSLEYPNRVIETINSLFNSVAGLTLEPNKTQYYNYKDNQITNFSYLGIENDSKNKKIIDFLGFSFGGRKVAIRQRTISRYYSKMYQKIKTIRKNNGYTRKGNKISNENLYKHYSIKGIHGGNGNFLSYVKRAKSCFGNNENIEISTKNHMQKISKALKSKNRK

SEQ ID NO: 253 - protein, 428 aa, Klebsiella pneumoniae
MVYREHSWFRKRGYLHFDKPISEEHALNIVTDPYAVATHSFLPFITFTSTTFKVQKDKGTNAINKTIKERPIAYSSHVDSHIYSYYASILNELYEEELKKNNITDNVLAFRALNKSNIEFAYDAFQEIKKRGNCSAVALDLSKFFETLDHSFLKKSWCQLLTAEKLPEDHYAVFKAITKFSKVDKNEVYELMGLPKNNAKHTKKTRKQICSFEDFRNKVRQSNLIIPNKANFGIPQGSPISALLSNIYMLNFDTEMKQYVSSLGGAYFRYCDDMLFIVPTHEKNNVAGEAEKRLFKLKVSLNIKKTEIRDFFVTPNKIKCDKPLQYLGFIFDGHNIFLRSSSLSRYSDRMKRGVRLAKATMKSKNKLRNSKGLPNKELFKEKVYARYAHVGKRNFLTYGYRASRIMHSNSIRKQLKPLWERLQKEIHR

SEQ ID NO: 254 - protein, 429 aa, Cupriavidus basilensis
MGFKKRSSDWFRRRTYLHFDLPIGREAATALVTDPVRVKTHAFYPLITFDIHTTKVKWDKKSSKLISSPKIRPIRYAAHLDSHIYSYYCERISALYEQYLKKCSYESSVLAFRKLNKSNIDFAADAFLAIKTMGNADAIALDISDFFGSLDHGILKRSWAKLLGQTTLPADHYNVFKSLTRYAYVSRDSVYGRFKISVHNPKASKKRICEPEDFRYVVRAGGLISRNEEPKGIPQGSPISALLSNVYMMDFDLAMAGAVDSVGGKYFRYCDDMLIIVPAGKGPSLKALAESQIKNFGLEIQAKKTEERTFTKTGAIITANRPLQYLGFLFDGQRILLRSASLARYSERMRRGVRLAKATARSRNEKRKERGEAIVPLRLRKLYKRYSYLGRRNFISYATKAARTMDAEGIRKQIKPLWKRLATEIKPSP

SEQ ID NO: 255 - protein, 467 aa, Acinetobacter baumannii
MLSFNQYQEEIYLKKHQLKASNNSKLKSRVHFDTPLDAHSAFALVSNPEKVSKHWFLPFIGFDQSVRKIRKHNGLTRRISKVRPLRYAANRDGYIYAYYSYLLDKQYENLIKETALNSSVLAYRSLGKSNVDFAKEVFDWIAQSQGCNVLTIDLSSFFDTLDHEILKKQWQKVNNVERLSQDHYIVFKSLTNYSFMNMEDVLFALGWSDKFNRKRLGEKIPSPLRKKTSAPYQSLDDFRDIRKFRFSGPNGSFKYLVQTPEKIDGKRYGIPQGSPMSAILSNIYMLDFDHYCSELMKEIGGLYKRYCDDIIVLFPEIIKIDDIYKSLEKALHEYGGTQLKINPSKVEKIKFINKNGNLTAIDAVTNNYKPLQYLGFIYDGQKVLIRSSSLSNYYRRLISKIRSSKNKALQNNSRPYRRKIYRMYSHLARKQRNFITYAYKASATMEDNLIKRQLSNHWQRIHKELNK

SEQ ID NO: 256 - protein, 292 aa, Pseudomonas syringae
MVGIDIKGFFDNLSHTHLKSSWQKVIDRPSLPDDHFAVYKSLTRFSFVDRVEVYSALGISKNNPKNGRQRICDPHQFRSAIRGAGLVETNSIGKGIPQGSPISALLSNIYMMDFDKKLYSYVETHGGSYFRYCDDILLIVPLAKEADAIQFVDDEVAAIKLEVQKTKTEVCRFKKTPKGFRSDRALQYLGFIFDGENIYLRSSSLARYQERVNRGLSIAALSMQKVNTVRIARGQMPRSIFLRKLHSRYSYLGRRNFISYGYRAARIMNSKSIRKQLKPLWGRLRKKIEDIA

SEQ ID NO: 257 - protein, 428 aa, Pectobacterium brasiliense
MESHEHPWFRKRGYLHFDKPISLEHALDIVTNPKTIATHSFLPFITFTSTTYKIQKDKGTNAINKTLKERPIAYSSHIDSHIYSYYAATLDELYENELRTHKITKNVLAFRALNKSNIEFAYEAFQEIKKRGDCSVVALDLSKFFDTLDHSFLKDSWCRLLATDKLPEDHYAVFKAITKYSKVDKEKVYDLMSIPKNNAKHTKKTKKQICSFVDFRDKVRKANLIIPNKASYGIPQGSPISALLSNIYMLNFDIEMNEYVSSLGGEYFRYCDDMLFIVPTHEKNNVAGEAEKRLIKLKVSLNIKKTEIREFSVTPSKIKCDKPLQYLGFIFDGENIFLRSSSLSRYSDRMKRGVRLAKATMKRKNKIRKYKELAKKDLFKEKIYARYAHVGKRNFLTYGYRASRIMNSKSIRKQLKPLWERLQNEVNK

SEQ ID NO: 258 - protein, 427 aa, Photobacterium leiognathi
MKILIKDWFKPRKYIHFDLPINSKKASKIVTDSEVVAKHAFYPLINYDIVINKITKNPITKNIMVLEPKPRPISYPAHIDSHIYSYYSKILNYKYEKMIKENGLSDSILAFRTLGKSNIDFSLNAFNEIKKLGECSAVALDITKFFDTLDHETLKLKWCNLLDVKRLPNDHYNIFKSITKYSKVKKEDLYKALGISLNNPNKKRRRICEPHDFRGIVRKYKLIKVHKDSFGIPQGTPLSAMLSNIYMFDFDLKMNSFITQFGGKYFRYCDDILFIIPTEYKNIVEQTASIEIENLKLELNKKKTEIRNFQFKDNKLKSDKPLQYLGFIFDGKEIYIRSSSLAIYSSRMHKGVRLAKNTMIKYNKIRRANQEEERLIFKRKLYSRYSHLGKRNFITYGYSAAKKMNSSSIRRQLSPLFGRLNSEINKI

SEQ ID NO: 259 - protein, 190 aa, Flavonifractor plautii
MDRNEWKEKQAKKPAPQYTHFDRRISLVQCFKYVTSPEKISRHGFYPFIHYTIKSRKVKDGRKEKPKERQIYYAAHLDGWIYRYYSYLINEAYNRRVKVEDIDDVAVAYRTDLGKSNIQFAKTAFDHIRKACVCYVMIGDFTDFFDNLNHVYLKKQLCDLLSVNRLPDDFYAVYKNVTHFSYECFLIGTL

SEQ ID NO: 260 - protein, 533 aa, Allomuricauda eckloniae
MKNLSLYDEDVWKRFSEKIGKTNEEFELKKYPQFDPYFDFLKYGERLKKLVEDPSLELVSKHSFLPFVKILIKTPRYRYQDNISSCKLETKIRPISFASHFDTYLYAYYSFALNEKYQGYIKEKGFDGSILAYRTDLDGKCNIQFAKQAFDEVKSQNKVNGDCAVIALDITGYFDNIDHSLLKEKWCKVLDLEKLPKDQYKVYRSLTKYSYVRLHSVLKHFGIDLKKKKKNGEGWQTILDLIPDSIAGASFKDKFNLIRSRSLLTTNLPKQQKDGTLENRGIPQGSSMSALLSNIYLIDFDEWLVKLGRENGFKYYRYCDDLLIICSTKDAREINALVLSEIKKYKLVIQDKKTEYIVFKNNSAGKIRAFNQKKIVEKNVKINAQNENQFYKNLQYLGFEFNGQNIYIRPGSLSRYFRKAKGRIVKSVMMSYSNKGRGNKILRKQLYERYSHLGRRNFLSYAKNASKKTYRNSKGKVYEGMDSISIRRQLSAHFGIIEREVLKTSLQRFAQEEGKTKKRESRGRKRKERTLKL

SEQ ID NO: 261 - protein, 430 aa, Duganella sp.
MQTTREPWFRRRGYLHFDRPVGQAAALTIVSDPVRVAQRSFFPFLDFDILSTKVKWDDDLEQLVRKRKERKVAYASHIDSHIYSYYCQLLSARYEQELTRRGLEDCVLAFRSLGKSNIHFAAEGFTEVSRRSNCFVLGLDIRGFFDTLDHKILKSAWMAVLGVAQLSPDHYAVYKAITRFSMVNLDSVLELLGISKNNPKKGRNRLCSPEDFREKVRPSGMIRANSTGKGIPQGSSISALLSNIYMLEFDCFINEYVEGLGGKYFRYCDDMLFVLPLAAKTTCEAVIKDAISKCKLEIQDAKTERRDFVTRGGRLVTDKPLQYLGFLFDGERIYLRSASLARYSDRLMRGMHVAKATMRKRNRARVARGADPRPLFMGNLMRRYTYFGRRNFISYGYRAAKIMNSQSIRKQLRPLWTKFQLALKEERRKR

SEQ ID NO: 262 - protein, 488 aa, Azospirillum brasilense
MGNWRLKERDLKKYPHFDPIISIEEAEALATDPERVVKHAFFPLMRYVEGWNRFAKLGQKGEAKERPIRYAARRDAYIYQRYREILSSAYERELTALGLSDNIIAYRRIPSGSGSGGKCNIHFAFDAFQRIRQLDNCNVIALDISKYYESLDHSRIKEIWCRLIKSARLPRDHFQVFKSITNYSYVEKQEAYARLGYFGEKRKTNSGKTIHGYLTPYNETPKHLCKGYVFREKLAGSGRDRSIIHKNYLTYGIPQGAPISDVIANFYLIEFDFEVSELAKKMGGYYYRYSDDIILIVPRMHDDALALTDDIRLLIKQHGAKLEIKEKKSSVFHYYKSGKRQFFSLVKGEKGKNGIEYLGFRYDGNYIYLRDSTLSNLYRKIVRAVRHSAEINARRFPNKGEKEILESINIEEITKLFGKVERFDEKSENYRSWTFWTYACRAREIMGDLGKPILHQVKSYNDFIERRAKLEAAHAVKRREGRKPSVLP

SEQ ID NO: 263 - protein, 436 aa, Vibrio sp.
MKNTTEHPWFTKRNYLHFDIPVSVHKAERIASDPITVARHAFFPFISYSFQLTKLDRDTSTGKLYRKPKPRGVAYSSHVDSHIYAFYASKLSTLYEKQIKKLGLHESVLAFRKLDGKSNIHFADDAFKHISKFEDCSVIALDFSKFFDTLDHQILKEEWRKLLGEDYLPKDHYNVFRSLTKFSTVDKCALFDLFDISQYNPKANGRNRVCSPSEFRQKVRASGLIKKNPNGMMGIPQGSPISALLSNIYMLNFDAQMKSYVDSVDGKYFRYCDDMLFIVPSKHRDMIEKLANSKVTALKVKINSDKTEIRDFRIHDGKLSSFDEHGKQKPLQYLGFLFDGHSIFLRSTALARYSEKMKGGVKLAKKTMEKENRIRREKGEPEQTYLYKRKLHKLYTARGQRNFLSYGYRAAKIMNSKSIRKQLKPLWQRFQDEVSK

SEQ ID NO: 264 - protein, 425 aa, Aeromonas veronii
MMNSENQWFRSRGYLHFDSPVKLRKACQIVKSPLNVAQHAFFPLIKYNIQSLKISIDKDGNVQKKIKTRPISYASHIDSHIYSYYAGLLSDLYEKALSESQLEESVLAFRSLGKSNIDFANIAFEKIKAHGDCTAIAMDISGFFDNLNHEILKSMWCKLLQEHSLPNDHFNIYRSLTKSSVVNRDLLYTALKISRNNPKAAGLRLCNIKTFREKVRGLGLIETNSTGRGIPQGTSISALLSNIYMLDFDKKIKDIVTSISGEYYRYCDDMLFIIDSDKTRELISLVTQSISELKIEINDNKTEIRTFHTCRGVQKCDKPLQYLGFIFDGERKLLRSAALARFSGRMKAGVRLAKKTHQKANLIEEKNGVAKTPLFKKKIYERYSHLSKRNFITYGHKAANIMGSNAIKKQLKPLWGRLLKEMNEQ

SEQ ID NO: 265 - protein, 467 aa, Acinetobacter pittii
MLSFNQYQEEIYLKKHQLKASNNSKLKSRVHFDTPLDAHSAFALVSNPEKVSKHWFLPFIGFDQSVRKIRKHNGLTRRISKVRPLRYAANRDGYIYAYYSYLLDKQYENLIKETSLNSSVLAYRSLGKSNVDFAKEVFDWIAQTQGCNVLTIDLSSFFDTLDHEILKKQWQKVNNVERLSQDHYIVFKSLTNYSFMNMEDVLFALGWSDKFNRKRLGEKIPSPLRKKTSAPYQSLDDFRDIRKFRFSGPNGSFKYLIQIPEKIDGKRYGIPQGSPMSAILSNIYMLDFDHYCSELMKEIGGLYKRYCDDIIVLFPESIKIDDIYKSLEKALHEYGGTQLKINPSKVEKIQFINKSGNLTAIDAVTNNYKPLQYLGFIYDGQKVLIRSSSLSNYYRRLISKIRSSKNKALQNNSRPYRRKIYRMYSHLARKQRNFITYAYKASATMEDNLIKRQLSNHWQRIHKELNK

SEQ ID NO: 266 - protein, 436 aa, Vibrio splendidus
MKNTTEHPWFTKRNYLHFDIPVSVHKAERIASEPKTVARHAFFPFISYSFQLTKLDRDTSTGKLYRKPKPRGVAYSSHVDSHIYAFYASQLSTLYEKKIEKLGLHESVLAFRKLDGKSNIHFADDAFKHISKFEDCSVIALDFSKFFDTLDHQILKEEWRKLLGEDCLPKDHYNVFRSLTKFSTVDKCALFDLFDISQYNPKANGRNRVCSPSEFRQKVRASGLIEQNPNGMMGIPQGSPISALLSNIYMLNFDAQMKSYVDSVDGKYFRYCDDMLFIVPSEHRDMIEKLANSKVTALKVKINSDKTEIRDFRIHDGKLSSFDEHGKQKPLQYLGFLFDGHSIFLRSNALARYSEKMKGGVKLAKKTMEKENRIRRDKGEPEQTYLYKRKLHKLYTARGQRNFLSYGYRAAKIMNSKSIRKQLKPLWQRFQDEVSK

SEQ ID NO: 267 - protein, 489 aa, Tsuneonella flava
MKTTGAAPSRPDEWEPTAGDQKHYPHFDAPLALSEIRNIVNDPKRVARNAFFPLIQYEKRWQPFRTPKSGGAVGNGTIKPEKKSRKIRYAARRDAYIFARYRRLLAPLYEERLAKLGISDVPIAYRKIIGKDGRGKCNIDFAKEVFDEIELMGDCYAITLDISQFFESLDHEKIEADWCQLLQVPNLPDDHRAVFKALTEYRWVDRTEAYRRLGYFGVKYTNTGVKIEGYRIPFNSMPTQLCSPKEFRDKIAGGGLKPSIIKKNENPFGIPQGTPISDLIANIYLMEFDQKLSSLATAHGGRAFRYSDDILLLVKAQTDDDASAIEEDVRKSISSFGSQLFIKESKSSIHRFIKTEDSLSIQHLKGSGKNGLEYLGFRFDGKRIYLRDATLSNLKRKMTFVGRIRAIKHKRRYADRDYSTLKSTFNFDDFFQNFMRVEDFDQNSSVRQWTFWTYARRAVETFGNRGKPIEKQLKFLKPDGRRLIEDELR

SEQ ID NO: 268 - protein, 436 aa, Photobacterium phosphoreum
MKNISTPVWYTKRNYLHFDVQVCAAKASKIATNSSSVEKHAFFPFISYSFQLTKLDRDISTGKLYRKPKPRGVAYSSHIDSHIYAYYANQLSILYEQKIEKLGLNESVLAFRKLNGKSNIHFADDAFNYIRTMEACSVIALDFSKFFDTLDHETLKLEWCKLLGVCRLPKDHFNVFRSLTKFSTVDRDNLFKIFGISQYNPKANGRERICSPLEFRDKVRSDKLITPNPYTGKGIPQGSPISALLSNIYMLSFDKDMQQYVDTIGGKYFRYCDDMLFIVPSEHRNTIESLANSKITALKVQINKEKTEIRNFKIKNEQLCSFDELGKQKPLQYLGFLFDGHSVFLRSTALARYSEKMKGGVKLAKKTMAKENRIRQEKGEPEQDQLYKRKLHSLYSYRGKRNFLSYGYRAAKIMNSKSIKKQLKPLWQRFQDEILK

SEQ ID NO: 269 - protein, 436 aa, Photobacterium phosphoreum
MKNISTPVWYTKRNYLHFDVQVCAAKASKIATNSSSVEKHAFFPFISYSFQLTKLDRDISTGKLYRKPKPRGVAYSSHIDSHIYAYYANQLSILYEQKIEKLGLNESVLAFRKLNGKSNIHFADDAFNYIRTMEACSVIALDFSKFFDTLDHETLKLEWCKLLGVCRLPKDHFNVFRSLTKFSTVDRDNLFKIFGISQYNPKANGRERICSPLEFRDKVRSDKLITPNPYTGKGIPQGSPISALLSNIYMLSFDKDMQQYVDTIGGKYFRYCDDMLFIVPSEHRNTIESLANSKITSLKVQINKEKTEIRNFKIKNEQLCSFDELGKQKPLQYLGFLFDGHSVFLRSTALARYSEKMKGGVKLAKKTMAKENRIRQEKGEPEQDQLYKRKLHSLYSYRGKRNFLSYGYRAAKIMNSKSIKKQLKPLWQRFQDEILK

SEQ ID NO: 270 - protein, 436 aa, Photobacterium kishitanii
MKNTSTPVWYSKRSYLHFDMPVCAAKAYKIATNSSSVAKHAFFPFISYSFQLTKLDRDISTGKLYRKPKPRGVAYSSHIDSHIYAYYASQLSTLYEQEIIKLGLNESVLAFRKLDGKSNIHFADDAFNYVRKIEECSVIALDFSKFFDTLDHEILKVEWCKLLGVVRLPKDHFNVFRSLSQFSTVDRDKLFKTFGISQYTPKANGRERICLPLEFRNKVRVAGLITPNPNGEKGIPQGSPISALLSNIYMISFDQEMKKYVDTIGGKYFRYCDDMLFIVPPQYKKMIESLANSKITALKVQINKEKTEIRDFKYQDNKLCSFDENGKQKPLQYLGFLFDGHSVFLRSTALARYSEKMKGGVKLAKKTMDKENKIRQSKGELEQEQLYKRKLHKLYSYRGKRNFLSYGYRAAKIMKSNSIKKQLKPLWQRFQDELLK

SEQ ID NO: 271 - protein, 427 aa, Photobacterium sp.
MKILIKDWFKPRKYLHFDLPINSKKASKIVTDSEVVAKHAFYPLINYDIVINKITKNPITKNIMVLEPKLRPISYPAHIDSHIYSYYSKMLNYKYEKMIKENGLSDSILAFRTLGKSNIDFSLNAFDEIKKLGECSAVALDITKFFDTLDHEILKLKWCNLLDVKRLPNDHYNIFKSITKYSKVKKEDLYKALGISLNNPNKKRRRICEPHDFRGIVRKYKLIKVHKDSFGIPQGTPLSAMLSNIYMFDFDLKMNFFITQLGGKYFRYCDDILFIIPNEYKNIVEQTASIEIKHLKLELNNKKTEIRNFQFKNNKLKSDKPLQYLGFIFDGKEVYIRSSSLARYSNRMHKGVRLAKKTMIKYNKIRIANQEEERLIFKRKLYSRYSHLGKRNFITYGHSAAKKMNSTSIRKQLAPLFERLNSEINKI

SEQ ID NO: 272 - protein, 466 aa, Acinetobacter haemolyticus
MNFDQYKEEIYDKKHRLKGSTASRGKSRIHFDTPLDIHSAYSLVSDPDKVSKHWFLPFIGFDQSIRKIRKHNGLTRRISKIRPLRYAANRDGYIYAYYSYLLDKKYESLIKDISLNSSVLAYRSLEKSNIDFAKEVFDWISQTQGCNVLTIDLSSFFDTLDHDILKKQWQRVNNVERLSEDHYMVFKSLTNYSFMNIEDALLALGWPDKSNRKRLGEKIPNPLRKKTSGYHGALNDFRNIRKYKFPEPDGSFRYLIQFPERIDGKRYGIPQGSPMSAILSNIYMFDFDQYCCDLIEKKGGIYRRYCDDIIVLFPQEFAIDDIYNALEEALYEYGGSQLKINPTKVEKIQFINNSGNLIAIDAVSKAYRPLQYLGFIYDGKKVLIRSSSLSNYYRRLVSKVRSSKNKANQNGTRPYRRKIYRMYSHLAKKQRNFITYAYRASAKIGDESIKRQVSNHWQRIHDELDK

SEQ ID NO: 273 - protein, 423 aa, Paraburkholderia sp.
MTTPLEWYRRRTYLHFDMPISENAATAITGNPDVVARHAFYPLINFTINSKKVKWDPVLKKLSLTSKERPVSYASHVDSHIYAYYAAILSEKYEAHLKSANYESAVLAFRKLGKSNIHFAKEAFTAIKKLGNADVITTDIKDFFGNLDHQILRAAWRAILGVESLPSDHYNVFKSLTRFSWVDKRNLYAALHISPNNPRASGPRICEPEAFRKVVRACKLIETNPHSRGIPQGSPISALLSNIYMVNFDEMMWDAVTAWGGKYFRYCDDMLIIAPHGKGKDLLNLAREFSDLYKLPLHPDKTEERTFTATSDGLTTDKPLQYLGFLFDGKRVVLRSASLARYSDRMKRGVRLAKATMRSRNDLRVGRGEAPTSLHKRKLYKRYSYLGRRNFVSYALRAAGILEAKEIKRQVKPLWKRLRKQMT

SEQ ID NO: 274 - protein, 425 aa, Chromatocurvus halotolerans
MATDDFSWYRHRNYLHFDNPLGKKSAEALVKNPLRVKSHSFYPLISYEIESIKIAKDAASGSIEKKKKPRPIRYAAHADSHIYSFYSTILSQKYEDLLRDKALSEHVLAFRPLGKNNIDFAAEAFEDIRVMGTCAAVALDITGFFDNIDHAILKDAWCDLLGEARLPGDHFAIFKSLTAYSYVPKLALYRQLGISQHNPKNNRKRVCEPRIFREIVRGGNLITTNENAYGIPQGSPISALLSNIYMVEFDEEASKLARSINGKYYRYCDDILFIVPIDQKDRIANKAKTMIRGLKLEINKKKIAVRSFTQRGNIQRADYPLQYLGFTFDGERILIRSAALARYSDKMKRGVKFAKATMRKRNGLRVLRGEPVKPLYRKSLYRLYSHVGRRNFLSYGYRAARRMNSPAIKRQLKPLWRRLEEEIER

SEQ ID NO: 275 - protein, 488 aa, Altericroceibacterium spongiae
MKTTDAAPSQPTNISANWRPTSSDQKHYPHFDAPLKLSEIRKIVNDPQKVAQNAFFPLIEYTKSWQPFRTPKSKKKPKKKIRKIRYAARRDAYIYARYRRILSPLYEKRLEKLKITEVPIAYRKIPNLNGKGKCNVDFANDVFEFISHLKNCTVITLDISKFFDSLDHQRIEKIWRSLLNVEKLPNDHLAVFNSITKYRWVDKKKAYERLGYFGKKKSKTGALIDGFLNSYKDMPKQLCKPSVFREKISGKGPVPSIINKNSNAYGIPQGTPISDLIANMYMLDFDCFLKKIATQHGGRSYRYSDDILIVLDTLDIDLANRIEDDIIKSISSFGVEIKINKNKSSIHRFKKNYKDKILCECVRGSGKNGLEYLGFRFDGQKVFLRDLTLANLRRKLTSSAYAFSSKHKKRYASKNQHELTDMFNFDLFFQKFMKVQDFDKNQSVKNWTFWTYARRASETFGSKGSPIFKQLKFFKPDTKRIIEQQLSK

SEQ ID NO: 276 - protein, 423 aa, Paraburkholderia sp.
MNVPLEWYRRRTYLHFDMPISESAAISITGNPAVVARHAFYPFITFTITSKKVKWDKTLKKLSIVPKPRPVSYASHVDSHIYAYYGALLSDRYEAHLREAEYEPAVLAFRKLSKSNIHFAKEAFAAIAKIGNADVITTDIRDFFGNLDHKILKAAWCSILGVDALPKDHYTVFKSLTKFAQVDKRNLYAALHISPNNPRASGPRICEPDEFRQVVRGSKLIETNALARGIPQGSPISALLSNIYMANFDELMWNAVTAWGGKYFRYCDDMLIIAPHGRGKDLLKLAQQFADLHKLPLHPDKTEERTFTVTSGGLMADKPLQYLGFVFDGKRVILRSASLARYSDRMKRGVRLAKATMRSRNDLRVGRGEAPISLHKRKLYKRYSYLGRRNFVSYALRAAGILEAKEIKRQVKPLWKRLRKQMI

SEQ ID NO: 277 - protein, 423 aa, Burkholderia stabilis
MSEPAEWFKRRRYLHFDLPISEPAAVAIAGNPSVVARHAFYPFIQFTVKSRKVKWDKLTKRLVTTEKERPVSYASHVDSHIYACYASILSQHYEDYLKEVGYQSSVLAFRKLGKSNIEFAKDAFDAIKKMGGADVIAADISDFFGSLNHKILKASWAKILKANELPNDHYNVFRSLTHFTWVDKTNLYKALGISIYNPRSSGARVCTPEIFRSVVRKLGLIQRNATDKGIPQGSPISALLSNIYMTDFDQAMWTSIASMGGKYFRYCDDMLIIAPEGKGKEFMQLARELADLYALPLHPKKTEERFFTSSSGKLLADKPLQYLGFVFDGQQVSLRSASLARYSDRMRRGVRLARVTMHARNTLRVERGESPRPLYKGKLYRQYSYLGRRNFVSYAIRAANILDEKAIKRQVKPLWKRLRSQMK

SEQ ID NO: 278 - protein, 486 aa, Azospirillum brasilense
MENWRLKERDLKKYPHFDPIISIEEAEALATDPERVAKHAFFPLMRYVEGWNRFAKLGQKGEAKERPIRYAARRDAYIYQRYREILSSAYERELSALGLSENIIAYRRIPSGGGNGGKCNIHFAFDAFQRIRQFDNCNVIALDISKYYESLDHNRIKEIWCQLIKAARLPRDHFQVFKSITNYSYVEKQEAYTRLGYFGEKRKTNSGKTIHGYLTPYNETPKHLCKGYVFREKLAGAGRDRSIIHKNYLTYGIPQGAPISDVIANFYLIKFDFEISKLARRMEGYYYRYSDDIILIVPRMHDDALALTDEIRLLIKQHGTKLEIKEKKSSVFHYYKSGNRQFFSLVKGEKGKNGIEYLGFRYDGNFIYLRDSTLSNLYRKIVRAVRHRAEINARRFPNKSDNEILEGINIEEITKLFGKVERFDEKSENYRSWTFWTYARRAREIMGDLGKPILHQVKSYNDFIKRRAKLEAEHAVKRREGRKQSV

SEQ ID NO: 279 - protein, 425 aa, Nitrincola iocasae
MDKRKHPWYRQRGYLHFDLPIGFKKASFIVKNPTAVAKYSFWPLIDYQIIVEKLAKSDAGVLEKKTKERPIAYAAHLDSHIYAYYSHILSSHYEKELLRLGLEQNVLAFRSLGKSNIHFANDAFNAIRAFGPCGVVGVDISGFFDNLDHMLLKKRWCDLLGKSQLPLDHYRVFRSLTHYASVNRDELYSTLGIAKHNPKHGRKRVCSPKEFDRLVRSGALIKKNDGSMGIPQGSPISALLSNIYMLKFDQHMAEAVNEWGGHYFRYCDDMLFIVPKEFTDSVAGMVARDIKALNLTINTKKTERRIFDYDSSGSLFSEKPLQYLGFLFNGQNIFIRSAAFARFSERMKRGVTLAKSTCRKRNKTKIRRGKKTTTLYKRKLYDRYSHLGKRNFIRYAIRAAEIMESKTIKRQIKPLWRNLQDEINQ

SEQ ID NO: 280 - protein, 428 aa, Klebsiella michiganensis
MECRENSWFKKRGYLHFDKPITEEHALDIVTNSRSVATHSFLPFITFTATTFKVQKDKGTNAINKTLKERPIAYSSHVDSHIYSYYASILEKVYEEELKKHRISGNVLAFRALGKSNIEFAYEAFQEIKIRGDCSAVALDLSKFFDTLDHGFLKKAWCRLIGVDKLPEDHYAVFKAITKFSKVDKNQVYDLMGLPKNNARHTKRLVKQICSFDDFRNKVRKSNLIIPNKANFGIPQGSPISALLSNIYMLNFDIEMNEYVSSLGGAYFRYCDDMLFIVPSNEKNNIAGEAEKKLFKLKLSLNTKKTEIRDFFVTPSKIKCDKPLQYLGFLFDGHNVFLRSSSLSRYSDRMKRGVRLAKATMKRKNKIRKLKGLPKKELFKEKVYARYSHVGKRNFLTYGYRASRIMNSSSIRKQLKPLWERLQKEVNK

SEQ ID NO: 281 - protein, 326 aa, Escherichia coli
MESREHPWFRKRGYLHFDKPISVEHALDIVTNPNSIATHSFLPFITFTSTAFKIHKDKCTNAIEKTTKRRQIAYSSHIDSHIYSYYAGILDSLYEEQLQIHNISKNVLAFRSLGKSNIEFANEAFQEIKQRGNCSAVALDLSEFFDTLEHSLLKDAWCRLLVTDILPHDHYAVFKAITKYSKVDKETVYELMAIPKNNAKHAKKTRKQICSFAEFRNKIRKSKLILSNKDNFGIPQGSPISATLSNIYMLNFDIEMNQYMTSLGGEYFRYCDDMLFIVPTHEKNNVAREAEKQLFKLKVSLNVRKTEIREFKTTPTKILSDKPLQY

SEQ ID NO: 282 - protein, 440 aa, Marinobacter antarcticus
MSLAPFGFANSRTRIKVRKHPWYRKRGYLHFDLPVGKEKTESIVSSPSKIRRHAFWPLIDYELQSVKITKDESGRLTRKVKNRPIAYAAHLDSHIYAYYARLLERPYEEAIEQANINSCVLAFRQLGKSNIEFARDAFKTISNAASVGVVAVDISGFFDNLNHQILKQRWADLLGHSKLPDDHYAVFRSLTRSSKVNRDDLYKALGVSKQNPKRDRARICTPTDFRNIVRGSGMIKNNPNPFGIPQGTPISALLSNIYMFDFDREINEIVSETGGYYFRYCDDMLFIIPKEFMAGVEKAVAERIKKLKLSINPDKTESRVFTRHSDSSITANKPLQYLGFLFDGQRIFIRSAAFARHSQRMKKGVRLAKKTRDKRNGHRFQKAQPGKPLYRGQLYEKYSHLGSRNFIRYGYRAARTMKSSAIRKQLRPLWEELITEIKKT

SEQ ID NO: 283 - protein, 430 aa, Rugamonas fusca
MQTTREPWFRRRGYLHFDRPVGQAAALTIVSDPVRVAQRSFFPFLDFDILSTKVKWDDDLKRLVRKRKERKVAYASHIDSHIYSYYCQLLSARYEQELTGRGLGDCVLAFRSLGKSNIHFAAEGFAEISRRSNCFVLGLDIRGFFDTLDHKILKSAWMSVLGVGQLSPDHYAVYKAITRFSMVNLDSVLELLGISKNNPRKGRNRLCSPEDFRDKVRPSGMIRANSTGKGIPQGSSISALLSNIYMLEFDCFINEYVAGLGGKYFRYCDDMLFVLPLAAKSTCEAVIKDAISKCQLELQDTKTERRDFVTREGRLVTDKPLQYLGFLFDGERIYLRSASLARYSDRLTRGVHLAKATMRKRNRARVARGEDPRPLFTGNLMRRYTYFGRRNFISYGYRAAKIMNSQSIRRQLRPLWGKFQLALKEERRKR

SEQ ID NO: 284 - protein, 451 aa, Aeromonas caviae
MRYLSPERKLDGHSPLPFRVLHFKAILMLNSNNQWFRSRGYQHFDAPVKLRKASKIVSSPENVSKHAFLPLISYSIESFKVHPNEDGKIVKKPKSRPVSYASHIDSHIYSYYAEKLSQLYERDLASLSLNDSVLAFRALKKSNIDFANDAFEKIKEHGNCTAIAMDISGFFDNLDHDILKSMWSKVLKVERLPSDHFNIFRSLTKYSTVKRDELFDKLKISKNNPRKAGLRLCNIKTFRDVVRSSDLIKTNKSGKGIPQGTSISALLSNIYMLDFDSKIKNIVTSMDGNYYRYCDDMLFIIDSDKRETLVNIVKENIAALKIDINGDKTEIRKFSIAHGIQKSDKPLQYLGFIFDGERKLIRSAALARFSGRMKAGVRLAKKTHSKANLIEEEKGISKTPLFKKKLYERYSHLSRRNFITYGHMAAKKMNSKAIKKQLKPLWGRLVREMDE

SEQ ID NO: 285 - protein, 467 aa, Acinetobacter pittii
MLSFNQYQEEIYLKKHQLKASNNSKLKSRVHFDTPLDAHSAFALVSNPEKVSKHWFLPFIGFDQSVRKIRKHNGLTRRISKVRPLRYAANRDGYIYAYYSYLLDKQYENLIKETSLNSSVLAYRSLGKSNVDFAKEVFDWIAQTQGCNVLTIDLSSFFDTLDHEILKKQWQKVNNVERLSQDHYIVFKSLTNYSFMNIEDVLFALGWSDKFNRKRLGEKIPSPLRKKTSAPYQSLDDFRDIRKFRFSGPNGSFKYLIQIPEKIDGKRYGIPQGSPMSAILSNIYMLDFDHYCSELMKEIGGLYKRYCDDIIVLFPESIKIDDIYKSLEKALHEYGGTQLKINPSKVEKIQFINKSGNLTAIDAVTNNYKPLQYLGFIYDGQKVLIRSSSLSNYYRRLISKIRSSKNKALQNNSRPYRRKIYRMYSHLARKQRNFITYAYKASATMEDNLIKRQLSNHWQRIHKELNK

SEQ ID NO: 286 - protein, 425 aa, Aeromonas dhakensis
MMNSENQWFRSRGYLHFDSPVKLRKACQIVKSPLNVAHHAFLPLISYDIHSFKISIDKDGNVQKKIKERPISYASHIDSHIYSYYAELLSNVYEKALHELQLKESVLAFRSLGKSNIDFANTAFEKIKAHGDCTAIAMDISGFFDNLDHVILKSMWCKLLQENSLPNDHFNIYRSLTKSSTVNRDLLYAALKISRNNPKSTGARLCDIKTFRDKIRGLGLIKTNSTGKGIPQGTSISALLSNIYMLDFDKKIKDIVVSISGEYYRYCDDMLFIIDSDKTSELISIVTKSISELKIEINDKKTEVRNFHVHSGVQKCDKPLQYLGFIFDGERKLIRSAALARFSGRMKAGVRLAKKTHQKANLIEEKNGVAKTPLFKKKIYERYSHLSKRNFITYGHKAANIMGSNAIKKQLKPLWGRLLKEMNEQ

SEQ ID NO: 287 - protein, 390 aa, Oceanobacillus sp.
MHFEIKFQKYSRKEKQPKEKVRKIFYASHIDSFIYKYYGDKLNDHYNSVVNELGINEVATAYRNNLSGKSNINFAKEVIDFIKVQKSAYVFVADFTNFFDTLDHRYLKEKIRYVLKKDTLPDDYYNVFKNITRFSYFIKDTIEAELKTKYTESEIKNSYKYFTEEEFRAFKHKNIYKNSKSYGIPQGAGISSVCSNIYLLDFDEKIQKYVKEQKGLYRRYCDDLIIVIPIKGDVQDYNYQIYQKVVDDIKEQIPNLEIQPEKTGNYFYANNQITDLEFNKTKLDYLGFSFNGKEVRIREKSLFKYYTRAYRKVRVCNRKSKEFGRKSYRRELYKNYSHLGKSKKGHGNFISYAERAQKIFDEDSKTVNLMHTQVKNHWKKIKLRLDDPKT

SEQ ID NO: 288 - protein, 423 aa, Burkholderia sp.
MSEPAEWFKRRKYLHFDLPISEPAAVAITGNPTVVARHAFYPFIQFTVKSRKVKWDKLTKRLMTSEKERPVSYASHVDSHIYAFYASILSQHYEDYLKEAGYQSSVLAFRKLGKSNIEFAKDAFDAIKKMGGADVIAADISDFFGSLNHKILKESWAKILKAKELPSDHYNVFKSLTLFTWVNKNNLYKCLGISIHNPRGFGARICEPDIFRTVVRKLGLIQRNATGRGIPQGSPISALLSNIYMTDFDQAMWTSIASMGGKYFRYCDDMLIIAPEGKGKEFMQLARELADLYALPLHPKKTEERFFTSSSGKLLADKPLQYLGFVFDGQQVSLRSASLARYSDRMRRGVRLARVTMHSRNTLRVERGESPRPLYKGKLYRRYSYLGRRNFVSYAIRAANILEEKAIKRQVKPLWKRLRSQMK

SEQ ID NO: 289 - protein, 425 aa, Aeromonas dhakensis
MMNSENQWFRSRGYLHFDSPVKLRKACQIVKSPLNVAHHAFLPLISYDIHSFKISIDKDGNVQKKIKERPISYASHIDSHIYSYYAELLSNVYEKALHELQLKESVLAFRSLGKSNIDFANTAFEKIKAHGDCTAIAMDISGFFDNLDHVILKSMWCKLLQENSLPNDHFNIYRSLTKSSTVNRDLLYAALKISRNNPKSTGARLCDIKTFRDKIRGLGLIKTNSTGKGIPQGTSISALLSNIYMLDFDKKIKDIVVSISGEYYRYCDDMLFIIDSDKTSELISIVTKSISELKIEINDKKTEVRNFHVYSGVQKCDKPLQYLGFIFDGERKLIRSAALARFSGRMKAGVRLAKKTHQKANLIEEKNGVAKTPLFKKKIYERYSHLSKRNFITYGHKAANIMGSNAIKKQLKPLWGRLLKEMNEQ

SEQ ID NO: 290 - protein, 427 aa, Sphingomonas ursincola
MKRVKKDGWYLSRGYSHFDHPLSFDAAAKIVKNPRRVASHSFLPLVSFTDVKRQFRTDNSDKTIPRKQRRKIVKSKRREIKYASHVDSAIFSYYAYLLQERYEPLIRLEGLNKSIIGYRSGLGSNIDLAADAFAEIAHRGDVVALCFDIENFFPSILHSSLKAALCEILGVPVLSADWYAVFKNVCSYADVELKDLALQEGFDPKDPPFPLVSDISSALLRSRSSKIIKKNSTNKAVPQGTPISAVFANVSMLPLDRAMHRWCLGISGSYRRYSDDIMLLVPPGFELEAEQKLISEACALSLIVNAAKTEVSRFYLANGIQKCDIPVQYLGFIFDGDRVRLRDRALSRYYRRMTYATRQSVRGAGIAGKLASQAHKRSLFRDFTHLGTRNFYTYAKRAHKKFPKSAIKRQMRRHFQVLLRKLSNRGR

SEQ ID NO: 291 - protein, 423 aa, Paraburkholderia caribensis
MSESEGWYKRRRYLHFDLPISEKAATVIAGNPEIVRRHAFYPFIRFAVKSHKIKWDKTVKKLVVTPKERPVSYAAHVDSHIYAYYASILSERYETYLKSVPYQPSVLAFRKLGKSNIEFAKEAFDAIKAMGGADVLAADFSDFFGNLDHQILKRTWSTILDVKALPEDHYNVFKSLTKFTWVDKRNLYKVLGISPYNPRSSGARICEPDTFRSIVRGLGLIERNKSAIGIPQGSPISALLSNIYMIGFDQAMWTAITASGGKYFRYCDDMLIIAPEGKGKDYMKLAEELAALHRLPLHPKKTEERFFTSVSGKLTANKPLQYLGFVFDGQQVSLRSASLARYSERMRRGVRLARVTMGVRNELRVGRGEVPTPLYKGKLYKRYSYLGRRNFISYAHRAARILDGKTIKRQVKPLWKRLRQKMK

SEQ ID NO: 292 - protein, 304 aa, Shewanella algae
MSSNYPLWYRSRGYLHFDLPVSFKKAKCLVTNPNLVSKHAFFPLISYVVESKKISKNRTTRKINVALKERPIAYSSHIDSHIYAFYADLLSEKYENKLKSAGLSECVLAFRGLRKSNIDFAHEAFQQIKAMGECSAVALDFSKFFERLDHQIIKQSWINLLGEKRLPNDHFNVFKSITKFSQVDKIELYKKLDISLNNPKKDRDRVCSVQDFRDVVRKGKLIKTNKNSFGIPQGSPISALLSNIYMFDFDSEMKRYMDIHGGKYYRYCDDMLFIVPSQLKNNVAGYAQERVKQLKVSINHKKQS

SEQ ID NO: 293 - protein, 266 aa, Rhizobium anhuiense
MKPWTPTVRRYPHFDPVISVDEAAAIATNPTQVAKHTFYPFLKYNEGWTAFAKKGTFGRRKDRPIRYAARLDSCIFSYYRYLLSEPYEEKLLAEGLANSVIAYRRILKSNGRGGQSNVEFALSAVDAIRSLGNCCTLALDISSFFESLDHVRLREVWGDLLGVSRLPEDHFRVYQAITRYAYVELEEAYERLGFYGEKKDRHGKTRLGYLRSLKEMPVQLCDGRSFRAKIASDGGPLDNQNKQGGHGRSARRTTFRSSRKRLSAGI

SEQ ID NO: 294 - protein, 342 aa, Gluconobacter morbifer
MRWPDVLPPFATVVMSSDFRFERSDLKQYPHFDAPIALKEIHHLVTNPERVASNSFYPFFMYFKEWQPFRLKAAGRPEKKQRPIRYGARRDAYIFSYYRQILSDLYEKKLIEYGIEDCPVAYRKIKKKSGGGKCNIDFAKDAFDEIDRLKDCLVICLDIKGYFESLDHNLIKKVWCELLNVKQLPKDHYAVFKNITKYRYVDQRAVYKRLGFFGIVDSKKPSIEGHVKDIPKQLCSPSDFRNKICGKDKSFGPSLIEKNEFHYGIPQGAPISDIIANFYLMKFDKTLNEYAQRKGGKYIRYSDDILLIIPGGTENLHEAVNLAIEDIKKYGDEIEIKKVKHV

SEQ ID NO: 295 - protein, 428 aa, Cronobacter sakazakii
MESRDNPWFKRRGYLHFDKPISENHALNIVTNPNLVARHSFLPFITFTSTTFKVQKDKATDTINKISKTRPIAYSSHVDSHIYSYYASILNDLYEKELLARGIPDCVLAFRTLNKSNIEFAHEAFEQIKLRGNCSAVALDLSKFFDTLDHSLLKGAWCSLLSTNELPQDHYAVFKSLTKFSKVDRNEVYDLIGISKNNAKHTKTIRKQICSFDDFRNKVRKSNLIISNKAGFGIPQGSPISALLSNIYMLDFDTEINKYISSLGGKYFRYCDDMLFIVPSSEKNNVAGEAEKRLFKLKVSLNIKKTEIRDFFVTPLKIKCDKPLQYLGFIFDGHNIFLRSSSLSRYSDRMKRGVRLAKATMKRKNKIRKTKGLSKKNLFKEKIYARYSHVGRRNFLTYGYRASRIMNSKSIRKQLKPLWERLQNEMEK

SEQ ID NO: 296 - protein, 442 aa, Lactobacillus intestinalis
MDKDTWFNNKKIIQKSKKSYAHFDLRTNITKVRNYITQPEKIAHHGFYPFIKYKLVYKKFSKEKGKEYVKERIICYAAHIDRCIYQYYSALLNEKYNLRLKQEGINLIPVAYRTNLHCNNIEIFHNIVKFIKNQSSCYIMIGDFTDFFDKIDHLYLKKQLCNLLEVNTLTQDYYAIFKSVTQYNSWELKDILNLNHLKNTKADVKKLNTKNRILSRKLFKMYRKHIHCNKSGKGIPQGSPISACLANIYMLELDKKINDFVQSRGGMYRRYSDDFVIILPIQSQTQQDIEEIITLFDKWKKEGILELQSEKTQVFKLNKKNHLKNIGHLFIPKLNESKHKINFLGFSFDGKQVVIRDKAISKYYYRMRHKAIGIARKYNRKNGYKGSDKLYRLYSERGEYGKGNFLTYVRRVKKNFPNDPIDTPTKNNMVKIRKTLEHYKSN

SEQ ID NO: 297 - protein, 436 aa, Vibrio cyclitrophicus
MKNTTEHPWFTKRNYLHFDIPVSVHKAERIASEPKTVARHAFFPFISYSFQLTKLDRDTSTGKLYRKPKPRGVAYSSHVDSHIYAFYASQLSTLYEKKIEKLGLHESVLAFRKLDGKSNIHFADDAFKHISKFEDCSVIALDFSKFFDTLDHQILKEEWRKLLGEDCLPKDHYNVFRSLTKFSTVDKCALFDLFDISQYNPKANGRNRVCSPSEFRQKVRASGLIEQNPNGMMGIPQGSPISALLSNIYMLNFDAQMKSYVDSVEGKYFRYCDDMLFIVPSEHRDMIEKLANSKVTALKVKINSDKTEIRDFRIHDGKLSSFDEHGKQKPLQYLGFLFDGHSIFLRSTALARYSEKMKGGVKLAKKTMEKENRIRRDKGEPEQTYLYKRKLHKLYTARGQRNFLSYGYRAAKIMNSKSIRKQLKPLWQRFQDEVSK

SEQ ID NO: 298 - protein, 436 aa, Vibrio fluvialis
MKNTSCPFWYTKRNYLHFDVPVSVKKAEKIATSSSSVAKHAFFPFISYSFQLTKLDRDTSTGKLYRKPKPRGVAYSSHVDSHIYAYYASQLSSLYEQKIEESDLHESVLAFRKLNGKSNIHFADDAFNYIRQMKECSAIALDFSKFFDTLDHRILKEEWSKLLQVKHLPKDHYNVFRSLTKFSIVERDELFKTFGISQYNPKANGRNRVCTPIEFREKVRGCGLIKSNPNGAMGIPQGSPISALLSNIYMFSFDEHMKNYVDSFGGKYFRYCDDMLFIVPSDHRDMVETLANSKIKALKVKINSDKTEIRDFRFQNDMLCSFDESGKQKPLQYLGFLFDGNSIFLRSTALARYSEKMKGGVKLAKKTMEKENRIRKSKGEPEQDQLYKRKLHRLYSFRGRRNFLSYGYRAAKIMNSKSIKKQLKPLWQRLQDEIDK

SEQ ID NO: 299 - protein, 429 aa, Enterobacter hormaechei
MESREHPWFRKRGYLHFDKPISIEHALDIVTNPRAVAAHSFLPFITFTSTTYKVQKDKGTNAINKTLKERPIAYSSHVDSHIYSYYAATLNELYENALQIHGISKNVLAFRSLSKSNIEFAYDAFQEIKKRGECSAVALDLSKFFDTLDHSFLKDAWCRLLSTDKLPEDHYAVFKAITKYSKVDKEKVYDLMGIPKNNARYTKKTRKQICSFVDFRDKVRKNALIISNKANFGIPQGSPISALLSNIYMLNFDIEMKDYVATLGGEYFRYCDDMLFIVPQSAKNNVAGEAEKRLNKLKVSLNTKKTEIREFSFASKKIKCDKPLQYLGFVFDGQNIFLRSSSLSRYSDRMKRGVRLAKATMKRKNNIRKHKGLAKKELFKEKIYARYAHVGKRNFLTYGYRASRIMKSNSIRKQLKPLWERLQKEINRS

SEQ ID NO: 300 - protein, 224 aa, Vibrio sp.
MQHLLPDTHFSPFISYSFQLTKLDRDRSTGKLYRKPKPRGVAYSSHIDSHIYAYYASQLSSLYEHKVEKFGLHESVLAFRKLDGKSNIHFADDAFNYIRENGECSVIALDFSKFFDTLDHKILKEEWSKLLQVNSLPKDHYNVFRSLTKFSTVDRDELFKVFEISQYNPKANGRNRVCNPTEFREKVRGSGLIKPNPNGAMGIPQGSPISALLSNIYMSHLMNT

SEQ ID NO: 301 - protein, 425 aa, Chrysiogenes arsenatis
MRKEKYPWYRNRNYLHFDPAVGFIQAHQLVTDPNRVSSHAFYPLISYQITTEKFKRDSETKLLKRHPKSRDIAYAAHLDSHIYSYYSWQLGQLYEKELKARRIDDHVLAFRALSKSNIDFAAEVFESIRAKGNCSAVAMDIKGFFDNLDHDYLKLAWALILKDVKLPSDHYAVFKSLTRFSTVDRDALFETLEISKHNPRFGRHRICSAREFREKVRCGGLITQNKTGKGIPQGTPISALLSNIYMIEFDQLMCSKMTLIGGDYYRYCDDMLFIVPTEKRDEVAGEVQKEIQKLKISINPEKTELRTFTVAAGTQSADKPLQYLGFTFDGQRVLIRSAALARYSERMKRGVKMAKATMRKRNSIKSSRGEDQKPLFKRQLYQRYSHLGKTNFLRYGYRASEVLLSGSIKKQLKPLWARLQKEIET

SEQ ID NO: 302 - protein, 425 aa, Pseudomonas rhodesiae
MSNAWYKSRRYLHFDRPVNEDAALKVVSDQRAVARHSFYPLIRYVAESQKVHFDKAAGRVVKKDPKKRQISYAAHLDSHIYSYYCEVLSDLYERYLSTTEWSASVLAFRTLGKSNIEFAYEAFMDIASRTECCVVGIDIKGFFDNLSHTHLKSSWQKLIDRPSLPDDHFAVFKSLTRFSFVDREEVYSALGISKNNPKNGRQRICEPHQFRSAIRGAGLVETNSIGKGIPQGSPISALLSNIYMMDFDEKLYSYVENHGGSYFRYCDDILLIVPLAKEAEAIQFVDDEVAAIKLEVQKTKTEVCRFKKTAKGFRSDRALQYLGFIFDGENIYLRSSSLARYQERVNRGLSIATLSMLKVNTARIARGQLPRSIFLRKLHSRYSYLGRRNFISYGYRAARIMNSKSIRKQLKPLWGRLRKKIEDIA

SEQ ID NO: 303 - protein, 427 aa, Photobacterium angustum
MIIPSKDWYRARTYLHFDLPISVNKASKTVYNPDLVSKHAFYPLINYTLEINKVSKDPISQAVIKLPPKPRPISFPGHLDSHIYAYYSKVLNREYEDKLRFNGLHNSILAFRTLGKSNIDFALDAFNEIKKHGECCAIALDITKFFENIDHEILKREWCNLLKVERLPKDHFNVYQSITKYSVVEKEALYKLLGISLNYKDSARRRICEPIDFRQKVRKNKLIKVHKHSYGIPQGTPLSAMLSNLYMFDFDLAMTTFVESYHGRYYRYCDDMLFIVPIEAKAITEQFAMEQIKSLNLSVNPNKTEVRTFYFNGGKLQTDKHLQYLGFMFDGDNIFIRSSSLARYSERMRRGVRLAKKTMVKYNNIRLANSQPERPLFKRKLYSRYTHLGRRNFITYGIRAANKMDSDSIRKQLKPLLKRFKDEVNKI

SEQ ID NO: 304 - protein, 425 aa, Yersinia similis
MQNTEHPWFRTRGYLHFDKPLSIQKTLRLVTNPKKIATHSFLPFITFDVKTYKITQDKITKKITKTGKDRAIKYSSHVDSHIYAYYADILSELYEEKLKEFGISSNVIAFRSLNKSNIEFANDAFESIRKRKNCCAVALDLTKFFDTLDHQLLKDAWCKILNTDLLSEDHYSVFKNITKFSGVDKEKLYDLLKISKNNPKNKRYSICSFNEFRDVVRKSGLIIPNKSGCGIPQGSPISALLSNIYMLNFDIDMKAYVDSVGGEYYRYCDDMLFIVPSEEINKVAGIAEKELFKLKVTLNIKKTERRTFSSTADKIVSDKPLQYLGFIFDGHNIYIRSSSLSRYSDRMRRGVKLAKATMKSKNKIRVIKGMEKKGLFKEKIYARYAHVGKRNFLTYGYRAARIMQSDTIRKQLKPLLYRLNKEIEK

SEQ ID NO: 305 - protein, 433 aa, Vibrio sp.
MSVPLWYTKRNYLHFDVPVSGTKAEKIVTSATSVARHAFFPFISYSFQLTKLDRDRSTGKLYRKPKPRGVAYSSHIDSHIYAYYASQLSSLYEHKVEKFGLHESVLAFRKLDGKSNIHFADDAFNYIRENGECSVIALDFSKFFDTLDHKILKEEWSKLLQVNSLPKDHYNVFRSLTKFSTVDREELFKVFEISQYNPKANGRNRVCNPIEFREKVRGSGLIKPNPNGAMGIPQGSPISALLSNIYMFSFDEHMKSYVDSIGGKYFRYCDDMLFIVPSEYRDTVEKLANSKIAALKVQINSDKTEIRDFKFQNGQLCSFDEFGKQKPLQYLGFLFDGHSIFLRSTALARYSEKMKGGVKLAKKTMEKENRIRKSKDEPEQDQLYKRKLHRLYSYRGKRNFLSYGYRAAKIMNSKSIKRQLKPLWQRLQDEISK

SEQ ID NO: 306 - protein, 436 aa, Photobacterium aquimaris
MKNTSEPIWYTKRNYLHFDISVTSTKATKIATNASIVATHAFYPFISYNFQLTKLDHDQTTGKLYRKPKPRGVAYSSHIDSHIYAYYAKQLSEPYEKKLLSLGLNESILAFRKLDGKSNIHFANDAFNDIRKMGTCTAIALDFSKFFDTLDHEILKEEWCKLLGVKRLPKDHFNVFQSLTKFTTVDRDRIFNTFGISQYNPKANGRNRICSPLEFRTQVRKAGLITKNPQGNKGIPQGSPISALLSNIYMLSFDCDMQNYVNSIGGKYFRYCDDMLFIVPSEYKNTVEALANSKIQALKVNINKDKTEIRNFELTNGKLCSFDEVGKQKPLQYLGFLFDGYSIFLRSTVLARYSEKMKGGVKLAKKTMDKENRIRHSKGEQEQDHLYKRKLHKLYSYRGKRNFLSYGYRAAKIMDSKSIKKQLKPLWNRLQDEILK

SEQ ID NO: 307 - protein, 436 aa, Vibrio natriegens
MKNTSCPFWYTKRNYLHFDVPVSVKKAEKIATSSSSVAKHAFFPFISYSFQLTKLDRDTSTGKLYRKPKPRGVAYSSHVDSHIYAYYASQLSSLYEQKIEESDLHESVLAFRKLNGKSNIHFADDAFNYIRQMKECSAIALDFSKFFDTLDHRILKEEWSKLLQVKHLPKDHYNVFRSLTKFSIVERDELFKTFGISQYNPKANGRNRVCTPIEFREKVRGCGLIKSNPNGAMGIPQGSPISALLSNIYMFSFDEHMKNYVDSFGGKYFRYCDDMLFIVPSDHRDMVETLANSKIKALKVKINSDKTEIRDFRFQNDMLCSFDESGKKKPLQYLGFLFDGNSIFLRSTALARYSEKMKGGVKLAKKTMEKENRIRKSKGEPEQDQLYKRKLHRLYSFRGRRNFLSYGYRAAKIMNSKSIKKQLKPLWQRLQDEIDK

SEQ ID NO: 308 - protein, 438 aa, Ignavibacteria bacterium
MPETKEWLDKEVKLVRYKRKYLHFDRKVNPARIANQISNPEFIIKRAFWPFIESTINFQRYKKDIKNGSRKIENKSRKICYASHFDSEIYSYYNFILSDHYEKKLLELGLADNIIAYRSIHKKCNIHFASEVFDKIKEIGSTTVLTFDIEKFFDTLDHELLLKNWKFVSGVDHIPENQYAVFKSITKFASVKKEELEKLFDFGDMIKKRIGRICSSIEFREIVRKSRLINKNTSGVGIPQGSPISGLLSNIYMIDFDIQIKNKIEKLNGYYRRYSDDLIILCPPGNSEEIKNYIIDSIKSISKLEINPDKTSVVIFTKNAENRLSASDENAKPTSLQYLGFEFNGENLFIRSSSVSRYYRKMARGVKKAKIQSKYSKSNKSKVFKRKLYRLYSHLGKRNFISYAYRSSIITKSLTIKKQLSKHWFKLHQKIYGIKNEN

SEQ ID NO: 309 - protein, 476 aa, Bradyrhizobium sp.
MTKWEMRPGDLKRYPHFDALISIPEAMALATDPERVAKHTFYPFMLFSNRWTKFAPKGAAGKMKERPIRYAARSDAYILSYYRHQISQLYEVALAKAEISECVLAYRRLRTETGAGKCNIHFANDAFNTISLAGDCAVVALDISSFFEHLDHDRLRAQWSNIIKQKKLPPDHERVFRAVTRYSVVEKLSVYERLDLFGEKRKGSKGEAINGYLVPFKSMPKQLCTGKQFREKIAGGDGRKSLIQVNFKPFGIPQGSPISDLLANMYLFEFDIVMNDITRKLGGAYMRYSDDILLIIPGQAAAGISLMNEARKQIEKFGKKLRIKEEKCSVFEFKKTGMRQTCELVHGSQGRNGIEYLGFRFDGKNIFLRDSTLANLNRKIARVAKAHVFSLIKRYPGKDRAFLKSKIKVEAVVQRFGRVVDFGEHSDDYRTWTFWTYARRASVIFGSRGAPILRQLRHLREAVAFRLNAELEKFAR

SEQ ID NO: 310 - protein, 230 aa, Cellvibrio sp.
MSSEDWYRKRNYLHFDRPISEKSAEKIVTNPKAVSVHSFYPLISYSISVTKIYKDESDRIGKKVKDRPISYAAHIDSHIYSFYCHLLTPLYEDLLHKYGLEDNILAFRKLGKNNIDFAFDAFKEIKSLGEKYSGCTAIGLDITGFFDNLDHELLKHSWQQLINKNVLPDDHFAVFRSLTKFSKVDRSSLYKLLDISEHNPKNDRFRVCSPAEFRNLVRANKLIVLFCTQN

SEQ ID NO: 311 - protein, 393 aa, Verrucomicrobia bacterium
MPMLHWNIQAQKVRRRDDGSLERKPPKDRPICYAAHKDAAIYGYYGQLLAAAYESKIRGVGITDCVTAFRESCKRCNIDFAQEAFEWIGQKGECTALAFDIKGFFDNLDHTILKAQWCRVLGTDHLPEDHYAVFRSLSKFAFVDRAAVFREFGISAQNPRANQRKRICSPLEFRERVRGKHLVQTNTSCKGIPQGSPMSAVLSNIYMWDFDVAVAQHIQAAGGLYRRYCDDMLCVVPLDKERETEDFVLAEIQKVKLEVQGEKTKRHHFRIEGGKLSADEPLQYLGFIFDGHRTLLRTASVARYYRKMRAAVRLAVQTKRKADAVRAEHGEAKEPLKRRKLNIRYSYVGRHNFISYAIRAAKKMVEPAIRRQVKSHWKKLNAEVEKAQARTGS

SEQ ID NO: 312 - protein, 423 aa, Burkholderia ubonensis
MENPAEWYRRRTYLHFDMPISEKAACAIASNPAVVTRHAFYPFITFTIKTQKVKWDSASKKLSLIPKERPVSYASHVDSHIYAYYAALLSEKYENRLKSASFEPAVLAFRKLGKSNIHFAKDAFSAIKQLGSADVITTDIRDFFGNLDHQILKSAWKSILGVDALPDDHYNVFRSLTRFSWVEKRNLYAALHISLNNPRASGPRVCEPEDFRKIVRGCKLINKNPHSKGIPQGSPISALLSNIYMVNFDEMMWDAVTAWGGKYFRYCDDMLIIAPKGKGKDLLKLAQEFSDLHKLPLHPDKTEERTFTMTVDGLVADKPLQYLGFLFDGKRIILRSASLARYSDRMKRGVRLAKATMRRRNDLRVTRGETPITLRKRKLYKRYSYLGRRNFVSYALRAAGILEAQAIKRQVKPLWKRLRKQMG

SEQ ID NO: 313 - protein, 428 aa, Serratia marcescens
MECREHPWFKKRGYLHFDEPISVEHALDIVTNPHAVATHSFLPFITFTSTTYKVQKDKGTNAINKTLKERPIAYSSHVDSHIYSYYAAILDEKYEKELYTHGISKSVLAFRKLNKSNIEFAHEAFQEIKKRGECSAVALDLSKFFDTLDHSFLKNAWCRLLATDRLPKDHYAVFKAITKFSKVDKNEVYDLIGIPKNNASNTKKTRKKICSFDDFRNKVRKENLIASNKAGFGIPQGSPISALLSNIYMLNFDIEMNNYVSSLGGVYFRYCDDMLFIVPSHEKNNVAGEAEKKLFKLKVSLNTKKTEIREFIAIPSKIKCDKPLQYLGFMFDGENIFLRSSSLSRYSDRMKRGVRLAKATMRRKNRIRKLKGLPKKELFKEKIYARYAHVGKRNFLTYGYRASRIMHSNSIRKQLKPLWERLQKEIHK

SEQ ID NO: 314 - protein, 427 aa, Psychromonas sp.
MKLSPQDWYRTRTYLHFDLPISIKKASNIVPNPELVAKHAFYPLIHYEIELKKIGKHDITKKLIDLPVKSRPISYPAHIDSHIYSYYSKILNERYEEKIKVNDLSDSILAFRSLGKSNIDFALDAFNEVKKFGECCVVALDVSKFFTSLNHDHLKKEWCNLLLVDKLPKDHFNVYKSITKYSEVNKVDLYKLLNISLNYHNHKKRRVCEPIEFRDNVRKNKLIVTNKDDNGIPQGTPLSAMLSNMYMFDFDFAMKNFIEQCNGKYFRYCDDMLFIVPINKKIEVEAFATQEINKIGLSVNQKKTEIRTFTICEGKLTADKHLQYLGFMFDGENIYLRSSSLARYSVRMRRGVRLAKKTMLKYNNLRLASGNGERKLFKKKLYSRYTHLGKRNFITYGLRAAKTMDSPSIKRQLKPLFGRFNEELNKP

SEQ ID NO: 315 - protein, 436 aa, Vibrio cyclitrophicus
MKKPSVPLWYTKRNYLHFDVPVSGTKAEKIVTSAASVARHAFFPFISYSFQLTKLDKDASTGKLYRKPKSRGVAYSSHVDSHIYAYYASQLSNLYENQVEKTGLHESVLAFRKLDGKNNIHFADDAFNYIREKEECSVIALDFSKFFDTLDHNILKNEWSKLLQVSSLPKDHYNVFRSLTKFATVDRDELFKKFGISQYNPKANGRNRVCSPIEFRQNVRAAGLISLNPKGYMGIPQGSPISALLSNIYMLSFDEQMKSYVDAIGGKYFRYCDDMLFIVPSEYRDTVESLAISKIAALKVQINSDKTEIRDFRFHNGKLCSFDEFGKQKPLQYLGFLFDGHSIFLRSTALARYSEKMKGGVKLAKKTMDKENRIRKSKGEPEQSQLYRRKLHRLYSYRGRRNFLSYGYRAAKIMNSKSIKKQLKPLWQRLQDEIDK

SEQ ID NO: 316 - protein, 459 aa, Lysinibacillus sphaericus
MNRSNGPRRLHGLPSSSNVNWSKYKTRKYIHFDERVKIEHLKANIQDPSWVASYAFLPSIHFELILKKYITVKKADNSKVKKKEKKIRGIYYAAHKDSFIYKYYGDLLNNAYNEYASLTGIDAIAVAYRNNKQGKNNIDFAFEVFDFLLRQDEAIVIALDFKSFFDKIDHKSLKQKMKRVLCVEELPKDWYKIYKNITRYSYVEKSDIDEFLLDKYGKKRFKKVRSSLAKIMEPAEFREFKKGRLHVNLDDYGIPQGSGMSAVCSNVHLIDFDKEVLEWAKQKHEEALYKRYCDDLIIIIPVVNATVELLEDLKNELMDHIEKYRSEGLIIQEKKTELRIYKDKTIYNGKLRISSLDYLGFVVNKNIIRIREKSLFKYYSRAYKKAKISKRIGKATNRPGPKRKLYDLYTHLGHKYLNYGNFIAYAKKAHKLMRKLPCESHIKKQIKRHWRKIHKRLGD

SEQ ID NO: 317 - protein, 428 aa, Cronobacter sakazakii
MESRDNPWFKRRGYLHFDKPISENHALNIVTNPNLVARHSFLPFITFTSTTFKVQKDKATDTINKISKTRPIAYSSHVDSHIYSYYASILNDLYEKELLARGISDCVLAFRTLNKSNIEFAHEAFEQIKLRGNCSAVALDLSKFFDTLDHLLLKGAWCRLLSTNELPQDHYAVFKSLTKFSKVDRNEVYDLIGISKNNAKHTKTIRKQICSFDDFRNKVRKSNLIISNKAGFGIPQGSPISALLSNIYMLDFDTEINKYISSLGGKYFRYCDDMLFIVPSSEKNNVAGEAEKRLFKLKVSLNIKKTEIRDFFVTPLKIKCDKPLQYLGFIFDGHNIFLRSSSLSRYSDRMKRGVRLAKATMKRKNKIRKTKGLSKKNLFKEKIYARYSHVGRRNFLTYGYRASRIMKSKSIRKQLKPLWERLQNEMEK

SEQ ID NO: 318 - protein, 436 aa, Photobacterium angustum
MKNTPEPIWYTKRNYLHFDISVSATKATKIATNSFIVATHAFYPFISYNFQLTKLDRDLTTGKLYRKPKPRGVAYSSHIDSHIYAYYAHQLSELYEKKLSLLGLNTSVLAFRKIDGKSNIHFANDAFNDIRKMETCSAIALDFSKFFDTLDHEILKDEWCKLLEVTRLPKDHFNVFKSLTKFTTVDREKVFNTFGISQYNPKANGRNRICSPSEFRTNVRKAGLIEPNPQGNKGIPQGSPISALLSNIYMISFDRDMLNYVNSVGGKYFRYCDDMLFIVPSEYKNTVEALANSKIQALKVNINKDKTEIRNFELTHGKLCSFDEFGKQKPLQYLGFLFDGHSIYLRSTALARYSEKMKGGVKLAKKTMDKENRIRHSKGEQEQDQLYKRKLHKLYSYRGKRNFLSYGYKAAKIMDSKSIKKQLKPLWNRLQDEILK

SEQ ID NO: 319 - protein, 431 aa, Sphingomonas sp.
MRFEEKWQPYRDKQGGKPAKKIRQLRFASRRDAYIYSFYRHILREPYEAALKARGLDGNVIAYRKLATPEGKGKSNIDFALDAFNVIRAYGDAAVVTLDISKFFESIDHQLLRQQWCGLLGVAELPRDHAAVFRAMTRYAIVDRDAAYERLGFLKWQAKGSSQIPVYTTGFKDMPRQLCSNGDFREKICGKGGSFASLIETNKDDFGIPQGSPISDMLANLYLIDFDSALKAYVDAIGGAFFRYSDDIIIIVPGGDAEAVAARDFAMAEIKKHGSMIVIKESKTSVLRYYSVPGGQAFVKLHGEQGQNGLEYLGFRYDGKAAYLRDATMSRLYRKVTRSIRAEARALVKRYPGRDQAYIESKFDAPRFMQRYGRVADFDQTGNYDTWTFWTYAKRAIETFGSLGQPIGSQLKNYSGIVRTRMAHEISKALA

SEQ ID NO: 320 - protein, 479 aa, Mesorhizobium composti
MTIEWKPALKGYCHFDGHMSVKDAVLLATDPVRVARHPFYPFIRYHQRWTKYAEKGQSGKEKIRPIRYAARADAYIFSYYRYLLSRDYEARLQNENLTENVLAYRRILDSSGSGKCNIHFAMDGIKKIRNLGRCCAIAMDISNFFESIDHGVLKEAWKDVIGGSRLPPDHYAVYKAITAYSVVDKEKLYERLGYYGVKGHNKTGDPIKGYLKPPRDIPTKLTTGAEFRRAVAGGNGYRSLIDQNRKPFGVPQGAPISDLLANLYLLKFDMEVRDRVAALGGAYYRYSDDILIVTPQEPNEASDLEAWVRNTIRKYGDKIKIKPEKSALFHFQPSGDNQLWTRVSGDQGKNGLEYLGFRYDGRYMYLRDSTISNFLRKVTRGAKRAAHFAARRYPNKSAVQIFDLFDVDGFIQRYGRVEDFESKAGDVHNWTFWTYVTHAADVCGPLGRPIFKQLRHQRGAISGRIMGAIVNAVKWRDRA

SEQ ID NO: 321 - protein, 427 aa, Vibrio sp.
MKIPAKDWFRPRTYLHFDLPINIKKASKIVYSPDLVAKHAFYPLINYTIEVNKIGKDPITKTVINLPSKLRPISYPAHVDSHIYAYYSKLLNREYEKKLRSNELHDSILAFRSLGKSNIDFAFDAFNEIKKTGECCAIALDVSKFFDTLDHEVLKREWCNLLGVSRLPKDHFNVFKSITKHSIVEKEALYKSLGISLNYRNHARRRVCEPLEFRENVRKNKLIKTHKQLYGIPQGTPLSAMLSNIYMFEFDLKMRQFVNSLSGKYFRYCDDMLFIVPIEAKAIIEQYAMTQIQSLKLKVNPKKTEVRTFVFNGSELNSDSHLQYLGFMFNGKDIFIRSSSLARYSERMRRGVRLAKKTMLKYNNLRLINGQKERPLFKRKLYSRYTHLGKRNFITYGIRAANTMDSESIRRQLKPLLKRFKDEVNKT

SEQ ID NO: 322 - protein, 426 aa, Rheinheimera tangshanensis
MPTENNWYRNRGYIHFDAPVNLKKAIKIVTSPETISTHAFYPLIHYTIDSFKVFKNEHGKIEKKGKQRPIAYASHVDSHIYAYYAQLLAEKYEGALKAEGLGGNIIAFRSLGKSNIHFANDAFEEIVRRRSCSAIAIDITGFFDNLDHQLLKQQWSNVLGVEKLPTDHFNVFRSVTRYSKVNRDTLYTRLKISKNNPKYDRMRVCTADVFRNVVRAGKLIQVHQDTKGIPQGSPISALLSNLYMLSFDVAAKQISEKYEGTYYRYCDDMLFIVPTAYKDLIQQEITEEIVKVKLEINPKKTEVRDFWPSGAHLKANKPLQYLGFIFDGTHKLLRSAALAKFSSRMKAGVRLAKKTRNKANQQEREAGSKETPLFKRKLYERYSHLSKRNFITYGYRASGIMNSNAIRKQLKPLWGRLRAEFEDENS

SEQ ID NO: 323 - protein, 428 aa, Leclercia adecarboxylata
MVYREHSWFRKRGYLHFDKPISEEHALNIVTNPYAVATHSFLPFITFTSTTFKVQKDKGTNAINKTIKERPIAYSSHVDSHIYSYYASILNELYEEELKKNNISDNVLAFRALNKSNIEFAYDAFQEIKKRENCSAVALDLSKFFDTLDHLFLKKSWCQLLTTEKLPEDHYAVFKAITKFSKVDKNEVYELMGLPKNNAKHTKKTRKQICSFDDFRNKVRPSNLITPNKANFGIPQGSPISALLSNIYMLNFDTEMKQYVSSLGGAYFRYCDDMLFIVPTHEKNNVAGEAEKKLFKLKVSLNIKKTEIRDFFSTPNKIKCDKPLQYLGFIFDGHNIFLRSSSLSRYSDRMKRGVRLAKATMKSKNKIRKSKGLPNKGLFKEKVYARYAHVGKRNFLTYGYRASRIMHSNSIRKQLKPLWERLQKEINK

SEQ ID NO: 324 - protein, 480 aa, Devosia sp.
MTGWIPDQDALKWYPHFDKYLSPEKAGKVATDAHRVATNSFFPLLRYVQAWQPFRTKITKGTLKERPIRYASRRDAYIYSYYRKLLSERYEAELARLGISACPIAYRKIPVEGGSGGKCNIHFAKDVFDVISDIGNCTVVALDISKFFEHLDHYKLKKIWARMLGVNQLPADHFAVYSSLTKYSYVERDDLYKRLGIIQEKIVNGRTVEFYTVPFDKMPLQLCTSAQFRELVAGENGVHSSLIKKNEFEYGIPQGTPLSDLLANMYLIDFDVALENYASSRGGRYFRYSDDILLIIPGSASEGVNAEKFAQMSILASGKNLVIKSSKTIMVEFKKAGDLLSYSIPAGYQNKNGLEYLGFRFDGKHVYLRDSTLSNLYRKMSKVLYHECLALVKRYRDKTPAQIVPLFDLDAVHARFSRVEDFEKYADSKRNWTFWTYARRASEIMGERGTKIPYQLKSNRLNFEAMFLEKLSFAYARINK

SEQ ID NO: 325 - protein, 430 aa, Duganella qianjiadongensis
MQTTREPWFRRRGYLHFDRPVGQAAALTIVSDPVRVAQRSFFPFLDFDILSTKVKWDDDLKQLVRKRKERKVAYASHIDSHIYSYYCQLLSARYEQELTRRGLGDCVLAFRSLGKSNIHFAAEGFAEVSRRSNCFVLGLDIRGFFDTLDHKILKSAWMSVLGVAQLSPDHYAVYKAITRFSMVNLDSVLELLGISKNNPRKGRNRLCTPEDFRDKVRPSGMIRANSTGKGIPQGSSISALLSNIYMLEFDCFINEYVAGLGGKYFRYCDDMLFVLPLAAKPTCEAVIKGAISKCKLEIQDAKTERRDFVTRGGRLVTDKPLQYLGFLFDGERIYLRSASLARYSDRLTRGVHLAKATMRKRNRARVARGEDPRPLFTGNLMRRYTYFGRRNFISYGYRAAKIMNSQSIKKQLRPLWGKFQLALKEERRKR

SEQ ID NO: 326 - protein, 479 aa, Caenispirillum salinarum
MTSKFELKSEHLKNYPHFDAPLSKREIMRLVTDKRRVAQNTFYPLFLYNEEWQPYRSVNGPKPDKKSRPIRYGARRDAYIFTYYRHLLSGPYERRLKTLGIEGCPIAYRKIPKPGSNSGKCNIDFAKDAFEAIDHLKDCVAIALDIEGYFENLDHSMIKSGWRDLLGAPELPEDHYAVFRNITKYHYVDQREVYRRLGFIKSIKVGASKIDQFTVPYRKMPKQLCKPEEFRAKICGYDPAYSNLVESNKSGRGIPQGAPISDLIANFYLLDFDVSANDFVKSRGGFYMRYSDDILLILPGAAREADDAVNFVKDEIKRYGSELRIKDKKTCVVQFRRDGPSLRHEHIYGPQGRNGLEYLGFRYDGKRVYIRDSTISRLYRKVSIAAKREAARHVRDNKSLGLKELKDSFNYSLLSQRFARVQKEHLSSDYRSWTFYTYLKRASATFGRKGNRILGQARRFDALMRLRVNAAIDKAYYKR

SEQ ID NO: 327 - protein, 425 aa, Nitrogeniibacter mangrovi
MVSHSPAWYRARRYLHFDVPIGLRKAETIVSNPEAVSRHSFYPLIVYEITSFKVKKDKITNRIERVEKKRPIAYASHIDSHIYSYYAEKLSELYEVALKEAGIGDSVLAFRSLGKSNIEFAGEAFKEISRRDECGVVALDVKGFFDNLDHDVLKCSWAKMLKSRVLPKDHFSVFKSITKYSSVRRDEIFGLFGISENNPKAGRVRICEAVEFRNRVRVGGCIKRNSHNFGIPQGSSISALLSNIYMFDFDVAACEMVKKYGGRYFRYCDDMLFVVPKSMRNSVAGEVRGRIRSLKLDINTKKTEICAFTKIAVGHECDKPLQYLGFVFDGRKILLRSAALARFSERMKAGVKLAKSTARKHNSLRVDHGRDKKELFKRKLYERYSHLGRRNFIRYGYRAAEILDSNSIKRQLKPLWDRLQDEIRK

SEQ ID NO: 328 - protein, 428 aa, Pantoea multigeneris
MESREHPWFRKRGYLHFDKPISVEHALDIVTNPNTVATHSFLPFITFTSTTFKIHKDKGTNAIAKTLKERPIAYSSHIDSHIYSYYAGILDYLYEEQLHTHDISKNVLAFRALGKSNIEFANEAFQEIKLRGNCSAVALDLSKFFDTLDHSLLKDAWCRLLATDILPQDHYAVFKAITKYSKVDKEKVYELMAIPKNNAKHAKKTKKQICSFSEFRNKVRKSNLIVPNKANFGIPQGSPISALLSNIYMLNFDIEMNQYVSSLGGKYFRYCDDMLFIIPTHEKNNVAGEAEKRLIKLKVSLNVKKTEIREFKATPIKIACDKPLQYLGFIFDGENISLRSSSLSRYSDRMKRGVKLAKATMKRKNKIRKHKGLPDKELFKEKVYARYAHVGKRNFLTYGYRASRIMKSTSIRKQLKPLWERLQEEIKK

SEQ ID NO: 329 - protein, 463 aa, Rhizobium leguminosarum
MYPHFDSFLTETEARALASDPARVAAHSFYPFILYHQRWTKFTAKGTKGKVKERPIRFAARADAYIFSYYRHLLSAPFEARLKELDLGDSVLAYRRIANPGGGGKCNIHFALDAVNAIRKLGNCSAIALDISSFFESLDHEMLRARWCDLLKVSRLPPDHYAVFKAMTRYSVIDREGLYERLGFWGQKHVSRDGVPIKGFLVDESAIPLQLCNGTDFRQKIAGGNGLRSLIEVHRKPYGIPQGSPISDLLANFYLMQFDKVVATRVRELGGAYFRYSDDILIVAPIEADAAVDLEAWVRQEIVCHGPKLQIKAEKSAIFRYWGTGGDQTWIRIAGEQGKNGIEYLGFRYDGNSMFLRDSTLSGLQRKAASSAMRLALSLVQRYPGKSSSDILTDVNLSTFLQRYGRVHDFESKADNVKNWTFWTYATKAASITAPLGLPIFKQLRNYRRNMRNHVKRALEKKA

SEQ ID NO: 330 - protein, 423 aa, Burkholderia cenocepacia
MSESVEWFKRRRYLHFDLPTSASAAVAITGNPSVVARHAFYPFIQFTVTSRKVKWDKLTKRLVTIEKERPVSYASHVDSHIYAYYASVLSEHYENHLKEVEYQASVLAFRKLGKSNIEFAKDAFDAIKEMSGADVIAADISDFFGSLNHKILKASWAKILKTKELPGDHYNVFKSLTRFTWVDKNNLYKCLGISVHNPRGSGPRICEPEIFRTVVRKLGLIQRNMTDKGIPQGSPISALLSNIYMTDFDQAMWTSVASMGGKYFRYCDDMLIIAPEGKGKESMQLARELADLYALPLHPKKTEERFFTSSSGKLLADKPLQYLGLVFDGQQVSLRSASLARYSERMKRGVRLARVTMRARNTLRVERGESPRPLYKGKLYRRYSYLGRRNFVSYAIRAANILNENAIKRQVKPLWKRLRNQMK

SEQ ID NO: 331 - protein, 428 aa, Klebsiella grimontii
MESREHSWYRRRGYLHFDKPVSLEHALDIVSNPELIATHSFLPFITFTSASYKIKQDKGTSAINKILKERPIAYSSHVDSHIYSYYAAILSEFYEKELQLHNVNKNVLAFRTLNKSNIDFAYEAFREIKIRGNCSAVALDLSKFFDTLDHGFLKEAWCRLLGKDKLPEDHYAVFKAITKYSKVDKNEVYDLMGIPKNNAKNAKKTRRQICTFVDFRNKVRKGKLIVSNKAGFGIPQGSPISALLSNIYMLNFDIEMNEYVSSLGGVYFRYCDDMLFIVPTEEKNNIAGEAEKRLIKLKVSLNIKKTEIREFSVSPTKIRCDKPLQYLGFLFDGDNIFLRSSSLSRYSDRMKRGVRLAKATMKRKNKIRKLKGLSKKELFKEKIYARYAHVGKRNFLTYGYRASRIMNSNSIRKQLKPLWERLQKEISK

SEQ ID NO: 332 - protein, 493 aa, Gluconobacter sp.
MRWPDVLPPFATVVMSSDFRFERSDLKQYPHFDAPIALKEIHHLVTNPERVASNSFYPFFMYFKEWQPFRLKAAGRPEKKQRPIRYGARRDAYIFSYYRQILSDLYEKKLIEYGIEDCPVAYRKIKKKRGGGKCNIDFAKDAFDEIDRLKDCLVICLDIKGYFESLDHNLIKKVWCELLNVKQLPKDHYAVFKNITKYRYVDQRAVYKRLGFFGIVDSKKPSIEGHVKDIPKQLCSPFDFRNKICGKDKSFGPSLIEKNEFHYGIPQGAPISDIIANFYLMKFDKTLNEYAQRKGGKYIRYSDDILLIIPGGTENLHEAVNLAIEDIKKYGDEIEIKKSKTCIVKFFQAEGRLLYTPIDFDGIKNTKQGIEYLGFRYDGNKVYIRESTVSRFFRKISSASKMQARKHVEKNLGKNQSQLINSFDYAYFYGKYGKVHKEKYIEDDYRSWTFYSYVKRSSEIFGDKGSGIHGQFSGFKKFTEKKVKQTIKKIVPE

SEQ ID NO: 333 - protein, 425 aa, Aeromonas veronii
MMNSENQWFRSRGYLHFDSPVKLRKACQIVKSPLNVAQHAFFPLIKYNIQSLKISIDKDGNVQKKIKTRPISYASHIDSHIYSYYAWLLSDLYEKALSESQLEESVLAFRSLGKSNIDFANIAFEKIKAHGDCTAIAMDISGFFDNLDHEILKSMWCKLLQEQSLPNDHFNIYRSLTKSSVVNRDLLYTALKISRNNPKAAGLRLCNIKTFREKVRGLGLIETNSTGRGIPQGTSISALLSNIYMLDFDKKIKDIVTSISGEYYRYCDDMLFIIDSDKTRELISLVTKSISELKIEINDKKTEIRTFHTCRGVQKCDKPLQYLGFIFDGERKLLRSAALARFSGRMKAGVRLAKKTHQKANLIEEENGVAKTPLFKKKIYERYSHLSKRNFITYGHKAANIMGSNAIKKQLKPLWGRLLKEMNEQ

SEQ ID NO: 334 - protein, 428 aa, Pantoea sp.
MESREHPWFRKRGYLHFDKPIPLEHALDIVTNPNTVATHSFLPFITFTSTTIKVHKDKITKVIAKTPKERPIAYSSHIDSHIYSYYAEILDYLYEEQLRIHNITKNVLAFRALSKSNIEFANEAFQEIKLRGDCSAVALDLSKFFDTLDHSFLKDAWCRLLATDKLPKDHYAVFKAITKYSKVDKDKVYELMSIPKNNAKHAKKTKKQICSFADFREKVRKSNLIIPNKANFGIPQGSPISALLSNIYMLNFDIEMNEYVSSLGGEYFRYCDDMLFIVPAHEKNNVAGEAEKRLIKLKVSLNVKKTEIREFKVTPTKIKCDKPLQYLGFIFDGHNIYLRSSSLSRYSDKMKRGVKLAKSTMKRKNKIRKQKGLPSKELFKEKVYARYAHVGKRNFLTYGYRASRIMNSNSIRKQLKPLWERLQKEIQK

SEQ ID NO: 335 - protein, 428 aa, Stutzerimonas stutzeri
MAEAWYKSRGYLHFDRPVNQATATEIVSNPDAVSRHAFYPFIRYVAQTQKVFFDKGLGKVVKKEPKKRDISYAAHVDSHIYSYYCTQLSQAYEEYLASTPWSPAILAFRSLDKKSNIHFARDAFLDIAVRESCCVVAIDIKGFFDNLNHEYLKNAWQSLLGKNKLPDDHYAVFRSLTKYSFVNRVQVYEVFGLSKNNPKNGRKRICEPQEFREKVRNGSLIETNKLNKGIPQGSPISAMLSNVYMMGFDEQVHAYVQACGGSYYRYCDDVLLIVPLDKEFEAKDFVNQRVDEIGLEIQEAKTETCKFTRSAKGLRTDRPLQYLGFIFDGANIYLRSSSLARYQDRVKRGIWVAEKCMDKVNAKRISRGQLPRSIFLKKLYKRYSYLGRRNFISYGYRAAKIMDSQSIRKQLKPHWNRLRERISAAQGE

SEQ ID NO: 336 - protein, 205 aa, Pantoea ananatis
MDLSLQTKKIGIPQGSPISALLSNIYMLNFDIDMNIYANSIGGHYYRYCDDMLFIVPSDRKKDVADIANQHLHELKVNLNTKKTEIRDFTFSGSRLIADQPLQYLGFIFDGENIYLRSSSLARYSERMRRGVKLAKSTMACRNKIRISKGEKIKPLFKKKIISRYSHFGKRNFLSYGFRAAEIMDSKTIRKQLKPLWKRLLNEIG

SEQ ID NO: 337 - protein, 495 aa, Sulfitobacter sp.
MEDEFDFTAKDLKHYPHFDAPITLREIRQLVTDPERVAANSFYPFFLYEESWQPYRSTDAAKPDKKTRPIRYGARRDAYIFAFYRRKLSRLYEVRLRDMGIEDCPIAYRQVLKPGRGGGKCNIDFAKDAFDEIDRLGDCVAVALDIKGYFENLDHGRIKRIWCDLLGVEKLPPDHYAVYKNITKYRYVDQRAVYSCLGYFGLRERNGQMVPGFLLPFRDMPKQLCSNADFRAKICGGDPKHQPTLVQKNTLPHGVPQGAPISDLIANFYLLEFDRVMADYARACGGRYKRYSDDILLILPGGSPEARAAIDFATAEVRRHGPELRIKDAKTCVAQFARTSDGLRFQHLRQHPDEPAKNGFEYLGFRYDGRRVYVRDSTISRFYGKVAGAAKRDARRHVENNPAMDAGELIGSFDFPLFSQRFSKVKKSNLTSDYRSWTFYSYLKRSAEAFGPKGDRILRQSRGFDDFMRERVRVAVVSGITKRKPVIPAAKPGSL

SEQ ID NO: 338 - protein, 470 aa, Acinetobacter baylyi
MELFLNFEQYKEEIYDKKHLSKDSYGNRPKSRIHFDMPLDALSAFSLVSNPDKVTKHWFLPFIGFEQNIRKIRDHNGLSRRKAKIRPLRYSANKDGYIYAYYSYALDKQYENLIKGSPLDNAVLAYRSLGKSNVDFAKEVFNWIDQTTGCNVLTIDLSSFFDTLDHGILKKQWQKVNGVNSLSKDNYMVFKSLTHYSFLNIEDALVALEWPDRLTRKSLNKGIPNPLRKETSARHESMKDFRSIRKHKFINTDGTFKYLIQIPEKIAGKRYGIPQGSPMSAILSNIYMLDFDEYCCNLMAQVSGIYRRYCDDIIVVFPKSTSIDEIYNELERSLHIYDGQQLKINPSKVEKIQFREKSGKLTAVDITTGVYKPLQYLGFIYDGKKVLIRSSSLSNYYRRLVSKVRASKNKAKRNRTIVYRRKIYRMYSHLARKQRNFITYAYKASETMDNVLIKKQLSNHWKRIHDELKK

SEQ ID NO: 339 - protein, 478 aa, Hyphomonadaceae bacterium
MDWTLTEKNLKRYLHFDSDISAVDAELLVKDPTLVSKHAFYPFILFNQHWNKWAEKGEKGEPKNRPIRYAARRDAYIFSYYRSLLASKYEERLISANLSENVLAYRKIIGPDGRGQCNIDFAKKAFDQIKNLSDCVAVTLDITRFFETLQHDKIKSDWCDLLGQPILPKDHYKVFNAITKYSYIERDVLFKELGFLGQKINPKNGAVSTGYLVSYDQMPKRQICKPSTLRSILKAKPEILTTNNVSTGIPQGAPISDLLANLYMLNFDQVMNEYALENGGIYLRYSDDIMIILPGDALIGYAARDKAFDLLAATAPNLAFKLEKTYIYTFQSKADGSLNINRDLGPANHGANGLEYLGFRFDGRSIFIRDSTLSNLWRKVARSANRHAVAVIKRYRDKSLAELYTELDVDNFAKKFGRVEEFAKHQDDVGSWTFWTYVKRCVKVFGGDVNGIASQVKAHKRVTKEKLHEALAYYYGRV

SEQ ID NO: 340 - protein, 470 aa, Acinetobacter soli
MELFLNFEQYKEEIYDKKHLSKDSYGNRPKSRIHFDMPLDALSAFSLVSNPDKVTKHWFLPFIGFEQNIRKIRDHNGLSRRKAKIRPLRYSANKDGYIYAYYSYALDKQYENLIKGSPLDNAVLAYRSLGKSNVDFAKEVFNWIDQTTGCNVLTIDLSSFFDTLDHGILKKQWQKVNGVNSLSKDNYMVFKSLTHYSFLNIEDALVALEWPDRLTRKSLNKGIPNPLRKETSARHESMKDFRSIRKHKFINTDGTFKYLIQIPEKIAGKRYGIPQGSPMSAILSNIYMLDFDEYCCNLMAQVSGIYRRYCDDIIVVFPKSTSIDEIYNELERSLHIYGGQQLKINPSKVEKIQFREKSGKLTAVDITTGVYKPLQYLGFIYDGKKVLIRSSSLSNYYRRLVSKVRASKNKAKRNRTIVYRRKIYRMYSHLARKQRNFITYAYKASETMDNVLIKKQLSNHWKRIHDELKK

SEQ ID NO: 341 - protein, 427 aa, Sphaerotilus montanus
MAVAPPKWFRQRRYLHFDEPLSLTKAKSLVTNSTAVATHSFWPLIRFTVETSKIKYDKSTGQLKNNLKDRHISYAAHSDSQIFSYYCSLLTERYEAEIKKRGLSDVALAFRSLGKSNIEFAKDAFEEIRSRGNCVAVALDVTKFFDRIDHTILKERWENLLGVRRLPIDHFAVFRALTRYSTVEQNAVFEALGISINNPRAHRRRLCTPDEFRSLVRGGRLIKKNPDVFGIPQGTAISAMLSNLYMLEFDSTANSFAIENGGRYMRYCDDMLFIMPPGMAADVEHFADTQTNRLKIEINPAKTDRCEFRISTGTITCEKPLQYLGFLFDGQRVIIRSAAFAKFSNRMKRGVSLAKQTMRSRNKARIRLGAKEQDLYLKKIYARYSHLGRRNFLRYGYRASDIMKSSAIRRQLRPLWGRLKQAVSDSE

SEQ ID NO: 342 - protein, 449 aa, Proteus sp.
MAAYPLLLGFARVMMKKSELPSWYKKRNYLHFDEAISAKKASSIVTNKKIVASHAFFPFISYEFSLNKLDRDLATGCLYRKPKQREVAYSSHIDSHIYAYYSEKLSELYEEKLVKKGLDKSILAFRKLDGKSNIHFSNDAFNYIRSKGECTAVALDFSKFFDTLDHEILKQEWCNLLEEKFLPNDHYNVFKSLTKFAKVDRGLLFQEFSISPYTPKANGRCRVCSSQDFRTIVRKKGFIQSNPNGKAGIPQGSPISALLSNIYMLSFDEKMKNYVDSINGIYFRYCDDMLFIVPSSERNNVEMYAIKEIGSLVVKINNEKTEIRDFKYQNGKLCSYEDGKIKPLQYLGFLFDGNSIYLRSAALARYSEKMKGGVKLAKSTMNRKNKIRAKNGELEQTILYKRKLHRLYSYRGKRNFLSYGYRAATIMNSKSIKKQLKPLWARLKDEIDK

SEQ ID NO: 343 - protein, 449 aa, Morganella morganii
MAAYPLLLGFARVMMKKSEYPSWYKKRNYLHFDEAINAKKATKIVVNKKAIASHAFFPFISYEFSTNKLDRDLVTGHLYRKPKQREVAYSSHIDSHIYSYYSEKLTELYECQLIKSGLSKSILAFRKLDGKSNIHFSNDAFNYIKGKGECTAVALDFSKFFDTLDHEILKQEWSKLLESQSLPSDHYNVFKSLTNFSKVDRDILFKEFGISQYTPKANGRSRICSSQEFRSIVRYKNFIRKNPNNKAGIPQGSPISALLSNIYMFSFDKKMKNYVDSINGIYFRYCDDMLFIVPSSERDVVEKYAIEEIKSLKVTINNKKTEIRDFRYQNGKLCSFDSGKAKPLQYLGFLFDGNAVYLRSAALARYSEKMKGGVKLAKNTMNRKNKIRIKNGETEQTILYKRKLHRLYSYRGKRNFLSYGYRAAKIMNSKSIKKQLKPLWIRLMDEINK

SEQ ID NO: 344 - protein, 427 aa, Pseudomonas otitidis
MAENWYKSRGYLHFDRPINQAAALDIVANPKAVARHAFYPFIRYVAQTKKVFFDKSIGKVVKKAPKERPISYAAHVDSHIYSYYCEQLNQAYENHLAEMEWSSSILAFRALGKSNIEFARDAFLNIAARESCCVIAIDIKGFFDNLDHVHLKVAWQSLLGTSQLPDDHYAVYRSLTKFSFVYRDQVYEALGLSKNNPKQGRKRICEPHEFRAKVRDRDLIETNKDKKGIPQGSPISALLSNVYMMGFDEQIHSYVQSCGGAYYRYCDDVLLIVPLEKEAEAKALVDQRVSEIGLEIQAAKTETCKFTRSAKGLRSERPLQYLGFIFDGASIYLRSSSLARYQDRVHRGIWLAEKCMDKVNAKRIARGQSPRSMFLKKLYKRYSYLGRRNFISYGYRAARIMDAPSIKKQLKPHWSRLRERISTAQGE

SEQ ID NO: 345 - protein, 451 aa, Actinobacillus pleuropneumoniae
MALDKSSWYKPRNYLHFDSPISQDQAYSLVTSPGNIVKHSFYPFLFYKLSAPKLKKSKNGKLERSVKERGISYASHKDSHIFSYYAYILNEKYESLLRKDRKYQKLFDSILAFRQLGKSNIDFAKFAFDMVHEKVHKYEECTVLALDITSFFDHLDHDILKKMWSIVLGEPKLPDHHYAVFRAITRFSRVDREEVFNFFNISANNPRKDKRNRICSPIEFRKFRKFRKSRKYTLFNNFPAFFINKDKKGIPQGSPISALLSNIYMLDFDLKIHEKVTKMNGIYLRYCDDILCIIPSKDVDEIYKYIREEIHNQLKLTINESKTEIIYFSYNKRKNKIVNDKYLQYLGFILHNGSISIRSAAFCRYSNKMKRGVDLAKQTQRKYNLIRDKKGIKNKKLYKKKLYSRYSHFGKCNFISYGKRASEKMSSIKIAKQLKPLWLRLRKEIHNTPDS

SEQ ID NO: 346 - protein, 421 aa, Pseudidiomarina donghaiensis
MATDDSTWFKRRGYLHFDAPIGAAKATKLVRNAKAVSKHAFYPLLRYDVIAKKLKRNSNGNLKLESKVRHISYAAHADSHIYSYYASLLAEAYERKLASLGLSECVLAFRKLGKSNIEFARDAFTEISNMGRCSAVAIDISKFFDTLNHQHLKRSWCDVIGTRKLPNDHYAVFKSLTKFSFCNREAIYKAFQISPNNPWNGRQRICKPAEFRKQVRDSGLITTNKVIFGIPQGTPISALLSNIYMIDFDQKMRSLAKECGGSYRRYCDDMLFIIKRGCEARVELQADCELKKLGVAINPKKTEVRQFWRYGGVQKANAPLQYLGFTFDGQRVLLRSAALAKFSGRMNKAIRLVSRTLESQLDEGEDVRLRKKKLYERYSHLGNRNFVRYGLRAANKMQSKAIRRQLKPLWGKLNKKIDEFN

SEQ ID NO: 347 - protein, 421 aa, Idiomarina loihiensis
MATDDSTWFKRRGYLHFDAPLGVAKATKLVRNTKAVSKHAFYPLLRYEVISKKLKRNADGKLKPEPKVRPISYAAHADSQIYSFYANQLAEAYERKLASLGISECVLAFRKLRKSNIEFARDAFSEISSMGRCSAVAIDISKFFDTINHQHLKRSWCDVIGRGKLPNDHYAVFKSLTKFSFCNRDAVYKTFQISSNNPWNGRQRICEPAEFRKRVRDSGLITTNKDIFGIPQGTPLSALLSNIYMIDFDRQMKALAKECGGSYRRYCDDMLFIVKRGCEARVESQADSELTKLGVVINPKKTEIRHFWRYGGVQTANAPLQYLGFTFDGQRILLRSAALAKFSGRMNKAIRLVSRALENQLDEGEDVRLRKKKLYERYSHLGHRNFIRYGLRAADKMHSKAIKRQLKPLWGKLNKKLDNLS

SEQ ID NO: 348 - protein, 513 aa, Rhizobium leguminosarum
MCRRVSRPVLNSRGREVNRKHNGSLAPSRLWGKCVKPWTPTVRRYPHFDPVISVEEAAAIATNPTQVAMHTFYPFLKYNEGWTAFAKKGTFGRRKDRPIRYAARLDSCIFSYYRYLLSEPYEQKLLAEGLTNSVIAYRRILKSNGRGGQSNVEFALSAVDAIRGLGNCCTLALDISSFFESLDHVRLREVWGDLLGVSRLPEDHFRVYQAITKYAYVELEEAYERLGFYGEKKDRHGKTRPGFLRSLKEMPVQLCDGRSFRAKIASDGGLPSIIKTNKEGMGVPQGAPLSDLLANAYLLEFDKFVRDLCAKVGGTYFRYSDDILIVAPINVEKALEMEQDVRAAISALGKGLVIKEAKSAIHRFEYGNGRQNISVIKAFDKNDKPMPSKPFEYLGFRYDGCSVFIRDKTMSNLHRKIASVCRASAIKMVKRYQGKAVDEILEMADLERLIQAFGPVEDFRSKASDYRAWTFTTYAKRASRAMGTLGKPIARQLGGLRRSIKTRLAAELQRALS

SEQ ID NO: 349 - protein, 492 aa, Albimonas pacifica
MDDDEFDFTGKDLKQYPHFDAPLSLREIRRLVTSPERVAKNTFYPFFLFEESWQPYRNTDAGRPEKKRRPIRYGARRDAYIFAFYRRKLARLYETRLREEGIAECPIAYRQVLKKDSGGGKCNIDFAKDAFDEIDRLGDCVAVALDIRKYFDRIDHAHIKRVWCSLLGVEALPADHYAVFKNITKYRFVDQRSVYRRLGYFGLRERDGKLVEGFLRPFRDVPKQLCSSAEFRAKICGGDAACGASLVRKNELPYGVPQGAPISDLIANFYLLDFDKVMARYARDRGGRYMRYSDDILLILPGGASEAKGAIAFAVGEMPRHGSALAINEAKTCVAQFVRTPDGLQFQHLAQHPDEAAKNGFEYLGFRYDGCQVFVRDSTMSRFYGKVAVAAKRDARRHFEANPALDPATLVASFNYSLFSERFSRVKKSNLTGDYRSWTFYSYLKRSARTFGPKGVRILHQARNFDDFMRLRVANAIERGAAKRRVTPAAAS

SEQ ID NO: 350 - protein, 426 aa, Pseudomonas otitidis
MDDDIWFKPRSYLHFDPPISKKNASTLVKDPALVKSHAFYPLIQFSVETQKIRFDRTTNKIERKKPKTRNISYASHLDSHIYSYYNQILNSLYEKALEREGISENVLAFRAQGKSNIHFANQAFCDIASRKECCAIGLDIKGFFDNLDHLQLKKAWADLIGQKKLPQDHYAVFKSITNYSFVDRTSLYEALKIPSTNPKNGRTRICSPEEFRRIVRARKLIKSNKDSKKGIPQGSPISALLSNIYMIDFDKAIQGFVKKITGTYYRYCDDMLIIVPRSDQIRTQNFVYSEIKKLNLEIQKDKNEIRIFKQTNGRLISEKPLQYLGFTFDGRSVLIRSGSLARYYERANRSIRLAKATMEKYNTIRIERGDLPRALHLKKLYKRHTYLGRRNFLSYGYRAAKILNSKSIKKQLRPHWERLRERIERD

SEQ ID NO: 351 - protein, 321 aa, Mannheimia haemolytica
MDISWYKPRNYLHFDSPITLQQAIKLVANPKHSFYPFLSYTLSVAKIKKDKNEGKLVRLIKNRGISYSSHKDSHIFSYYAYLLNEKYENLLKNKYYILDDSILAFRKLNKSNIDFARIAFDSIRSAQNCTVLGLDISKFFDHIDHKILKDMWCKVLGVPSLPEDHHSVFKAITKFVKVDRDTVFEFFNISLHNPRKNGKNRICSPREFREYRKLKKPDLFNDNPAFFINKGQKGIPQGSPISALLSNIYMLEFDVLVKEKIMECKGSYFRYCDDILCIIPNEYEEFILDYITGEIKSKLKLEINKDKTEVVKFQYCNRTKK

SEQ ID NO: 352 - protein, 177 aa, Mannheimia haemolytica
MDISWYKPRNYLHFDSPITLQQAIKLVANPNNVVKHSFYPFLSYTLSVAKIKKDKNEGKLVRLIKNRGISYSSHKDSHIFSYYAYLLNEKYENLLKNKYYILDDSILAFRKLNKSNIDFARIAFDSIRSAQNCTVLGLDISKFFDHIDHKILKDMWCKVLGVPSLPEDHHSVFKAIT

SEQ ID NO: 353 - protein, 322 aa, Mannheimia haemolytica
MDISWYKPRNYLHFDSPITLQQAIKLVANPNNVVKHSFYPFLSYTLSVAKIKKDKNEGKLVRLIKNRGISYSSHKDSHIFSYYAYLLNEKYENLLKNKYYILDDSILAFRKLNKSNIDFARIAFDSIRSAQNCTVLGLDISKFFDHKILKDMWCKVLGVPSLPEDHHSVFKAITKFVKVDRDTVFEFFNISLHNPRKNGKNRICSPREFREYRKLKKPDLFNDNPAFFINKGQKGIPQGSPISALLSNIYMLEFDVLVKEKIMECKGSYFRYCDDILCIIPNEYEEFILDYITGEIKSKLKLEINKDKTEVVKFQYCNRTKK

SEQ ID NO: 354 - protein, 195 aa, Pectobacterium colocasium
MDKEKVYDLMSIPKNNAKHTKKTKKQICSFVDFRDKVRKANLIIPNKASYGIPQGSPISALLSNIYMLNFDIEMNEYVSSLGGEYFRYCDDMLFIVPTHEKNNVAGEAEKRLIKLKVSLNIKKTEIREFSVTPSKIKCDKPLQYLGFIFDGENIFLRSSSLSRYSDRMKRGVRLAKATMKRKNKIRKYKGLAKKK

SEQ ID NO: 355 - protein, 166 aa, Pectobacterium sp.
MDKEKVYDLMSIPKNNAKHTKKTKKQICSFVDFRDKVRKANLIIPNKASYGIPQGSPISALLSNIYMLNFDIEMNEYVSSLGVNIFDIVTICFHCSPHMKNNVAGEAEKRLIKLKVSLTSRKTEIREFSVTPSKIKCDKPLQYLGFIFDGKIFSSGHHLYHVILTE

SEQ ID NO: 356 - protein, 430 aa, Bacillus cereus
MDKKKYGIKRYKHLDKKKSIEKVKDKIQDPQWVAKHGFYPFIHFEIKFQKYSRKEKQAKEKVRKIFYASHIDSYIYKYYGDELNNHYNCIADKLGISDIATAYRNNLSGKSNIDFSKEVIDFIKSQKAAYIFVADFTNFFDTLDHKYLKNKIRQVLKEDTLPDDYYNVFKNITRFSYFFKDAIEMDLETKYTESEIKGSYKYFTEEEFRDFKHKNIYRNTKGYGIPQGAGISSVCSNIYLLDFDKEIQNYVNEQNGIYRRYCDDLIIVIPIEGEFKNYDYTIPQTIVENIKMKIPNLEIQPEKTGNYFYTNDKIIDLEFKNTKLDYLGFSFNGEEVRIREKSLFKYYTRMYRKIRICNRKSKEFGRKSYRKALYRNYSHLGKKKKGHGNFLSYASRAQEIFDKESSTVNLMETQVKKHWKNINARLEDPE

SEQ ID NO: 357 - protein, 436 aa, Neisseria weaveri
MDLPWFKMRGYLHFDTPISLKKANELVSCPERVAKHSFYPFISCTLSAPKLKKSDQGKLIREPKKRVISYSSHKDSHIFSYYAYILNDKYEHLLNNSYSSINNSVLAFRKLGQNNINFAQQAFNHIKQAKNCSVIALDISDFFGNLDHKILKQQWCKLLGEDTLPVDHFAVFKAITQYTTISKDILFKEFKISSHTPRSNNRKRICTPEEFRSFRKKHKLSLALPDQNLFIPNKNRGVPQGSPISALLSNIYMIDFDAFCYNKISELGGLYLRYCDDILCIVPTPRVDEIQSLVNQEIMKLKLEIHPKKTEIITFKYDDKKRKVLNDKKLQYLGFILKDESITIRPAAFTKYSKKMKRGVSLAKQTQRKYNIIRSKNALSGKRLFKKKLYSTYSHFGRRNFISYGRRAAEIMESPQIRKQLKPLWKRLQYRIETDS

SEQ ID NO: 358 - protein, 308 aa, Aeromonas sp.
MDNAENKWFRSRGYLHFDAPVKLENAKKIVEFPDVVAKHAFLPLIQYDIYSFKVSVDDNGKLTKTKKSRNISYASHIDSHIYSYYSEKLSVFYENKLSDASLHNSILAFRALSKSNIDFANDAFEKIKTHGNCVAIAMDISGFFENLDHKILKDMWNKVLDTSVLPDDHYNIFKSLTKFSQVKRDVLFETLNLPRNNPHKIGRRLCDIKTFRDKVRGSKIITSNIKQKGIPQGTSISALLSNIYMLDFDSKVKVFITSLGGHYYRYCDDMLFIVNPEHQAITTKTIIELISKLKIEINPKKLRLVIFI

SEQ ID NO: 359 - protein, 431 aa, Aeromonas hydrophila
MDNAENKWFRSRGYLHFDAPVKLENAKKIVKFPDVVAKHAFLPLIQYDIYSFKVSVDDNGKLTKTKKSRNISYASHIDSHIYSYYSEKLSVFYENKLSDASLHNSILAFRALSKSNIDFANDAFEKIKTHGNCVAIAMDISGFFDNLDHKTLKDMWNKVLDTSVLPDDHYNIFKSLTKFSQVKRDVLFETLNLPRNNPHKIGRRLCDIKTFRDKVRGSKIITSNIKQKGIPQGTSISALLSNIYMLDFDSKVKVFITSLGGHYYRYCDDMLFIVNPEHQAITTETIIELISKLKIEINPKKTETRNFYMNGGVQKCDKPLQYLGFTFDGERKLIRSAALAKFSGRMKSGVRLAKKNHAKANLLEEEIGILKTPLFKRKIYERYSHLGKKNFITYGHMAAKTMKSKAIKKQLKPLWNRLTKEIEASLKVGHE

SEQ ID NO: 360 - protein, 431 aa, Aeromonas caviae; identical to SEQ ID NO: 359

SEQ ID NO: 361 - protein, 434 aa, Neisseria sp.
MDSPWFKMRGYLHFDTPISLKKANELVSCPERVAKHSFYPFISCTLSVPKLKKNAQGKLVRDPKKRVISYASHKDSHIFSYYAYILNKKYEQLLNNNYININNSVLAFRKLGKNNINFAEQAFNYIKQAKNCSVIALDISDFFGNLDHKILKKQWCKLLGEETLPNDHFAVFKAITQYTTISKNILFKEFKISPHTPRSDNRKRICTPKEFRLFRKKHKLSLDFPDQNLFIPNKNKGIPQGSPISALLSNIYMLDFDDFCQNQISKLGGLYLRYCDDILCIIPTPQVSEIHNLVLKEIMKLKLEIHPTKTEIITFGYDNNKRKVINNKKLQYLGFILKDESITIRPAAFTKYSKKMKRGVSLAKQTQRKYNIIRSKKNLLNRQLFKKKLYSTYSHFGRRNFISYARKAAEIMESPQIRKQLKPLWKRLQYRIKN

SEQ ID NO: 362 - protein, 494 aa, Agrobacterium larrymoorei
MEAHRSFCPLSLPRTTVKAWTASVRRYPHFDPVISEAEATDIATDPDRVRLHTFYPFLRYDEGWNAYAEKGKSGKRKDRPIRFAARLDSCIFSYYRHLLSAPYETKLQSEGLADAVIAYRRIAKASGGGGQSNIDFSLSAVEAIQSQGDCCSIALDISSFFETLDHDRLRDVWAELLGVPRLPNDHFKVFQAITRYAHVDVIQAYTRLGFYGDKTDRHGRTRPGYLKPRKEIPVQLCDGRTFQAKIARSATQPSIIEVNKCGKGVPQGAPLSDLLANAYLLDFDKYLRDVCSEFGGKFFRYSDDILVIAPISEIDARKLEADIRGAISTYGKGLVIKEEKSAIHRFEVNGDRQAVFTVKAADKSGNPMPSKPFEYLGFRYDGKHVYIRDKTMSNLHRKVASVCRATAIRQAKRYRGKTVHDILALTNIEKLIQAFGSVKDFKSKSADYRKWTFTTYAKRASKTMGPLGKPIERQIKNLRSAIHRKLEYELNRAR

SEQ ID NO: 363 - protein, 504 aa, Paracoccus sediminicola
MEDEFDFTAKDLKHYPHFDAPITLKEIRRLVTDPKKVAANSFYPFFLYEESWQPYRSTDAAKPDKKTRPIRYGARRDAYLFAFYRRKLSRLYEARLREMGIEDCPIAYRQVLKPGRGGGKCNIDLAKDAFDEIDRLGDCVAVALDVKGYFENLDHKRIKRIWCDLLGVEELPPDHYAVFKNITKYRYVDQRSVYSRLGYFGLRERNGHMIPGFLMPFRDMPKQLCSNADFRAKICGGDPKHGPSLVQKNVLPHGVPQGAPISDLIANFYMLEFDAVMAEYARARDGRYMRYSDDILMILPGGSPEARAAIDFATAEMRKHGPELRIKDAKTCVAQFQRAPGGLRFHHLKQRPDEAAKNGFEYLGFRYDGRRVYVRDSTISRFYSKVAGAAKRDARRHIEKNAEIDAVALIGSFDYALFSQRFSKVKKSNLTSDYRSWTFYSYLKRSAAAFGAKGDRILRQARAFDDFMRERVRSAIVSGVAKRKAPLKPAHSLPQSTSTAAHST

SEQ ID NO: 364 - protein, 491 aa, Pseudooceanicola sp.
MEDEFDFTAKDLKHYPHFDAPITLKEIRRLVTDPKRVASNSFYPFFLYEESWQPYRSTDAAKPDKKTRPIRYGARRDAYIFAFYRRKLSRLYEARLREMGIEDCPIAYRQVLKPGRGGGKCNIDFAKDAFDEIDRLGDCVAVALDVKGYFENLDHKRIKRIWCDLLGVAELPPDHYAVFRNITKYRYVDQRSVYSRLGYFGMRERNGHMIPGFLMPFRDMPKQLCSNADFRAKICGGDPKHGPSLVQKNVLPHGVPQGAPISDLIANFYMLEFDAVMAEFARAGGGRYMRYSDDILLILPGGSPEARAAIDFATAEMRKHGPELRIKDAKTCVAQFQQAPGGLRFHHLKQRPDEAAKNGFEYLGFRYDGRRVYVRDSTISRFYGKVAGAAKREGRRHVESNPAMDAGTLIGSFDYPLFSQRFSKVKKSNLTSDYRSWTFYSYLKRSAEAFGPKGDRILRQARGFDEFMKDRVRLAIVSGVAKRKPPVPETS

SEQ ID NO: 365 - protein, 497 aa, Paracoccus alkenifer
MEDEFDFTAKNLKHYPHFDAPITLREIRNLVTDRERVATNSFYPFFLYEDSWQPYRSTDAAKPDKKTRPIRYGARRDAYIFAFYRRKLSRLYEARLREIGIEDCPIAYRQVLKPGRGGGKCNIDFAKDAFDEIDRLGDCVAIALDIKGYFENLDHGRIKRIWCDLLGVERLPPDHYAVFQNITKYNFVDQRSAYSRLGYFGMRERNGHMTLGFLIPFRDMPKQICSNSDFRAKICGGDPKYGPSLVQKNVLPHGVPQGAPISDLIANFYLLEFDRVMADYARVRGGRYMRYSDDILLILRGGSPEAREAIAFATTEMRKHGPELRIKDAKTCVAQFQRIPGGLQFHHLKQRSDEVAKNGFEYLGFRYDGRRVYVRDSTISRFYRKVAGAAKRDGRLHAEKNPTLDAGTLISSFNFSLFSQRFSKVKKTNLTGDYRSWTFYSYLKRSAEAFGPKGDRILQQARGFDKHMKRKVSAAIVRSVTKGQSSKQTQVGCQPIM

SEQ ID NO: 366 - protein, 491 aa, Paracoccus pantotrophus
MEDEFDFTGKDLKHYPHFDAPITLREIRRLVSDPEKVRTNSFYPFFLYKESWQPYRSTDAAKPDKKTRPIRYGARRDAYIFAFYRRKLSRLYEARLREMGIEDCPIAYRQVLKPGRGGGKCNIDFAKDAFDEIDRLGDCVAVALDIKGYFENLDHKRIKRLWCDLLGVTKLPPDHYAVFKNITNYSFVDQRSVYLRLGYFGMRERNGQTIPGFLIPFRDMPKQLCSNSDFRAKICGGDPQYGPSLIQKNLVPHGVPQGAPISDLIANFYLLEFDRVMADYVRARDGRYMRYSDDILLILPGGSSEARAAVYFATTEMRKHGPELRIKDTKTCVAQFQRVPGGLQFRHLKQRPDETMKNGFEYLGFRYDGRRVYVRDSTISRFYGKVASAAKRDGRRHAEKNPTLDAGMLIDSFNFPLFSQRFSKVKKTNLTSDYRSWTFYSYLKRSADAFGPKGGNILRQARGFEDFMHARVTAALVSAVARRKVPVSAGS

SEQ ID NO: 367 - protein, 422 aa, Teredinibacter turnerae
MEDQNDWFKQRHYLHFDRPIGKSKAASIATSPHAVSEHSFYPFLSYEVIARKIFKENGNIQYKDKVRPIAFASHVDSHIYSYYGQLLYSRYEQQIEKLGIGNSILAFRRLGKSNIDFALDAFNDIQQRGSCTAIAFDISGFFDNLDHEILRRLWCSLFEFQRMPDDHFAVFKSITNFSIVDRKTLFAKLGYSINNLPSSLRRICTPLEFRNKVRNSGLIEKNKKSYGIPQGSPISAILSNIYMLEFDKFIFDAIEEQGGSYYRYCDDMLFIVPTEWRNNIADLVRREIKNLKIDINPKKTEIRDFSIINGRLHSQKPLQYLGFIYDGEQITIRSAAFAKYSARMRKAVRLAKKKKIKENRLRIQKGIPPESLYKKKLFSRYSHLGKQNFVRYGLRAAEKMNSKAIKRQMKPLWKRLQLEIEK

SEQ ID NO: 368 - protein, 530 aa, Eubacterium sp.
MEINKERLEKWKKENSSPAGYAHFDTKFGLNSAWDYIANPDNVAKHSFFPFIHYDKVFYKAYKASGEYVDKETNSIVRLPKKQREVKIKDKIRPICYSSHIDRCIYQYYGFLLNEHYNQYVDEQGFSSSVVAYRTNLHQNNIHFAKRAFDFIKQAECNIIVGDFKGFFDNLDHKTLKQNLCTVLGTSTLSPDWYAVFKNITKYSMWDLVDILKINGLITDEDIAQKQAAHEVALNGNTRKARELITYFDGKIKELNGFNIEDPKKRFEKLALTKEQFKQNKKDYIKPHKENFGIPQGSAISAVLSNVYMIDFDKKLYNFIHKFDGLYLRYSDDFIIILPSAAGITWDELKTYMHGVVYETEHLTLEKKKTQIYSYRNNQITNNTNPNAPSVSYIDYLGFVFDGKEITLRPKTISKYYYRMYKKLNHIVKCGGVTKKKNKVSYENLYRTYTQKGRNGEYDKSKLPQKVIKKNPNNPYKSGNFFSYVQKADEIFNPEYVGKNKVEVPQKPKEPITQATKRHMLKIRRIRDKI

SEQ ID NO: 369 - protein, 446 aa, Lichenibacterium sp.
MLISTRKRHIIRRSDWYSAKGRVHVDRRLPKADALRLVSNPATIAQHDFLPLISFTKRERRYRRDFGKKKPVASTKERGLAYPSNRDGYIFAYYAERLGSLYEVELALRGLGDSIIGYRKGSSNIDRALEAFREIQARGDCAAVCLDIKGFFDNISHEVLKACWSSLLGGGQLPSDHYKVFRALTRYATMDRADLLERLGLSPKKRDADLPRPLCSIDEYRRHRSDSAAPSKLLSTHRANHGIPQGTPLSATAANISMLEFDTAVKAAVDACGGSYRRYSDDILILCAPEHIAALEGEVNRALKLHGRTLWLNEQKREEALFSKPGPALLPCPVTGRVKPLQYLGFTFDGRRALIRSGTLARYYRRMRNGVRVAKQRLKLAKHGEIKGRKVLHQREVLARHSHLGPRSFISGYARLARKKMGGVGETSIRGQLSRHSEVLRERLKS

SEQ ID NO: 370 - protein, 329 aa, Alishewanella jeotgali
MVKKHDWYRMRGYIHFDAPIGLKKATAIVTNTKRVATHAFFPLLHYTIESFKVVKNSHGEVEKRIKQRPIAYASHLDSHIYSYYSRVLSARYEVALQERGLDKNVIAFRTLGKNNIDFANDAFEEVKKRRSCSAIALDITGFFDNLDHQILKEHWCYLLGADKLPNDHFNVFRSITRFSKVCRDTVYELLKIAKNNPKNGRFKICPEVFRRVIRANKLIQVNTDSKGVPQGSPISALLSNIYMLTFDVAAKNISDQYNGCYYRYCDDMLFIVPTAYKDLVEKAVIAEIAKVKLDINPKKTEVRDFWPSGSVMQSNKPLQYLGFIFDGQH

SEQ ID NO: 371 - protein, 436 aa, Vibrio paucivorans
MKNNVLPFWYVKRNYLHFDVPVSGAKAEKIVTSATSVARHAFFPFISYSFQLTKLDKDASTGKLYRKPKSRGVAYSSHVDSHIYAYYASQLSSLYENQVEKTGLHESVLAFRKLDGKSNIHFADDAFNYIREKEECSVIALDFSKFFDTLDHSILKNEWSKLLQVNCLPKDHYNVFRSLTKFSIVDRDELFKEFGISQYNPKANGRNRVCLPIDFRNKVRGAGLVTPNPNGSMGIPQGSPISALLSNIYMLSFDEQMKSYVDAIGGKYFRYCDDMLFIVPSEYRDTVESLAISKIAALKVQINSDKTEIRDFRFHDGKLCSFDEFGKQKPLQYLGFLFDGHSIFLRSTALARYSEKMKGGVKLAKKTMDKENRIRKSKGEPEQNQLYRRKLHRLYSYRGRRNFLSYGYRAAKIMNSKSIKKQLKPLWQRLQDEIDK

SEQ ID NO: 372 - protein, 467 aa, Acinetobacter ursingii
MLNFEEYKEQIYDKRHLSKGPHGNRPKSRIHFDMSLDAKSAFSLVSNPDKVAKHWFLPFIGFEQSVRKIRNHNGLSRRKAKIRPLRYSANRDGYIYAYYSYILDKQYENVINKTSLDTSILAYRSLGKSNVDFAKEVFDWIERAQECNVLAIDLSSFFDTLDHDILKKQWQRVNGVSNLSKDNYMVFKSLTHYSFLDIEEALSVLGWPDKLSRKRLGKSIPNPLRKETSARHQSIEDFKSIKKYKSVNLDGSYKYLVQIPEKKNGKRYGIPQGSPMSAILSNIYMLDFDQQCCDLMASIGGIYRRYCDDIIVIFPKNIHINDIYSKLKQFLIDHGGQQLRINDEKVEKIQFVKKLGVLTAIDAVSLENKPLQYLGFIYDGQKILIRSSSLSNYYRRLVSKIQASKNKAKRNGTKTYRRKIYRMYSHLARKQRNFITYTYRASEAMGEILIKRQLSNHWKRIHDELKK

SEQ ID NO: 373 - protein, 467 aa, Acinetobacter sp.
MLNFEEYKEQIYDKRHLSKGPNGNRPKSRIHFDMPLDAKSAFSLVSNPDKVAKHWFLPFIGFEQSVRKIRNHNGLSRRKAKIRPLRYSANRDGYIYAYYSYILDKQYENVINKTSLDTSILAYRSLGKSNVDFAKEVFDWIERAQECNVLAIDLSSFFDTLDHDILKKQWQRVNGVSNLSKDNYMVFKSLTHYSFLDIEEALSVLGWPDKLSRKRLGKCIPNPLRKETSARHQSIEDFQSIKKYKSVNSDGSYKYLVQIPEKKNGKRYGIPQGSPMSAILSNIYMLDFDQQCCDLMASIGGIYRRYCDDILVIFPKNIDINDIYSKLKQFLIDHGGQQLRINDEKVEKIQFVKKLGGLTAIDAVSLENKPLQYLGFIYDGQKILIRSSSLSNYYRRLVSKIQASKNKAKRNGTKTYRRKIYRMYSHLARKQRNFITYTYRASEAMDEILIKRQLSNHWKRIHDELKK

SEQ ID NO: 374 - protein, 431 aa, Pantoea sp.
MKSREHSWFRKRGYLHFDKPISLEHALDIVTNPNTVATHSFLPFITFTSTTSKAYKEKGSNSIKKTLKERPIAYSSHIDSHIYSYYAEILNYLYENQLQIHKISKNVLAFRALSKSNIDFANEAFQEIKKRGNCSAVALDLSKFFDTLDHAILKDAWCRLLSTDMLPNDHYAVFKAITKYSKVEKEKVYDLIGIPKNNAKHIKKTKKQICPFADFRNKVRKSELIIPNKANIGIPQGSPISALLSNIYMLNFDIEMSEYVSSLGGEYFRYCDDMLFIVPANEKKNVAGEAEKRLIQLKVSLNVKKTEIREFKVTSKKTICDKPLQYLGFIFDGESIFLRSSSLSRYSDRMKRGVKLAKATMKRKNKIRKLKGLPSKELFKEKIYARYAHVGKRNFLTYGYRASRIMNSNSIRKQLKPLWERLQKEIKSNKK

SEQ ID NO: 375 - protein, 425 aa, Aeromonas hydrophila
MMNSENQWFRSRGYLHFDSPVKIRKACQIVKSPLNVAQHAFFPLIKYNIQSLKISIDKDGNVQKKIKTRPISYASHIDSHIYSYYAKLLSDLYEKSLSESQLEESVLAFRSLGKSNIDFANIAFEKIKAHGDCTAIAMDISGFFDNLDHETLKSMWCKLLQEHSLPDDHFNIYRSLTKSSVVNRDLLYTALKISRNNPKTAGLRLCNIKTFREKVRGLGLIETNSTGRGIPQGTSISALLSNIYMLDFDKKIKDIVTSISGEYYRYCDDMLFIIDSDKTSELISLVTQSISELKIEINDKKTEIRTFHTYRGVQKCDKPLQYLGFIFDGERKLLRSAALARFSGRMKAGVRLAKKTHQKANRIEEKNGVAKTPLFKKKIYERYSHLSKRNFITYGHKAANIMGSNAIKKQLKPLWGRLLKEMNEQ

SEQ ID NO: 376 - protein, 426 aa, Verrucomicrobiota bacterium
MKLPKTLFARRRYLHFDEPLSPAASESLATSPVRVASWSFMPMLRWISQTRKVKRKADGTLEEKTKDRPISYAAHKDAAIYSYYGHLLSGRYESELAAIGISDSITAFRPDTGRCNIDFAHEALEWIRNQGECVAIAFDIKSFFDKKAQWRRLLKVERLPDDHFAVFSSLTRFAFADRTAVFKEFGISPHNPRATGRSRICSPNDFRERVRAKGLIQKNGNRYGIPQGSPMSAILSNIYMLDFDAAVSERVQAADGLYRRYCDDMLIVLSLEHAQDIEDLVMAQIKTVKLEIQPEKTKRQHFRSNGDRLTVDEPLQYLGFLFDGARILVRNGSVSRYYRKMRAAVSLVVQTKRKHDRIRAHQGKPLQQLKRRKLNIRYSYVGRHNFLSYAQRAAKKMSAPAIRKQVKRHWKKLNAEVDKVATKLLL

SEQ ID NO: 377 - protein, 425 aa, Wohlfahrtiimonas chitiniclastica
MKNQNLEWFKKRSYLHFDEKVGPKIAEKIVTNPQKVSQHSFYPMLRYNSISTKIKKDAQTGKLIKEKKPREITYSSHIDAHIYSYYGKILERAYEQQLSKLQISECVLAFRKLGKSNIDFSYEAFNEINKISTCHVVALDISGFFNNLDHTHLKDIWARILNEASLPSDHYSIYKSLTKYSYCKVDDIYEEFKISPNNPWYQRQRICSPIEFRNRVRKKGLITIHKDTKGIPQGTAISALLSNIFMLDFDVQMHKLMTEYNGSYRRYCDDMLFIYPPTQDIIDVEKFVSQEIASYSLSINNDKTEKRFFQNGISDKPLQYLGFTYDGTKILLRSAALAKFSSRMNKSLRLVKRTIDTQSKGLSQRVPLRRKKIYERYSHLGNRNFIRYGLRASQMMDSHAIKKQLRPLWNRLNTQLDNLDKYGKP

SEQ ID NO: 378 - protein, 436 aa, Photobacterium damselae
MKNTSQPPWFTKRNYLHFDIPVSVHKAERIVSEPITVAKHAFFPFISYSFQLTKLERDTSTGKLYRKPKPRGVAYSSHVDSHIYAFYASQLSTLYEKQIEKLGLHESVLAFRKLDGKSNIHFADDAFKYISKFESCSVIALDFSKFFDTLDHQILKEEWRKLLGEDCLPKDHYNVFRSLTKFSTVDKCALFDLFDISQYNPKANGRNRVCSPNEFRKKVRGSGLIEQNPNGMMGIPQGSPISALLSNIYMLNFDAEMKRYVDSVDGKYFRYCDDMLFIVPSEHRDMIEKLANSKVAALKVNINSDKTEIRDFRIHDGKLSSFDEHGKQKPLQYLGFLFDGHSIFLRSTALARYSEKMKGGVKLAKKTMEKENRIRRDKGEPEQTYVYKRKLHKLYTARGQRNFLSYGYRAAKIMNSKSIRKQLKPLWQRFQDEVSK

SEQ ID NO: 379 - protein, 464 aa, Exiguobacterium sp.
MKPLSYFSHYKSKNYLHLDKKVSIRHVYEQIQNPELVGKHAFLPFIHYSLNLEKYTFKEGIDRDRLKEFKELPNYNQNDHKCKKPKKREINYASHYDSYIYKYYGELLNEKYNEFMISQGIDECAIAYRNNKKGKNNIHFAKEVFKFILERDEAIVIALDFSSFFDNISHKSLKDTMKQLLEVEELPRDIYNVFKSITKYRSIEKEDLDKYLVEKYGKKELGKLIDEKKIHSYMDIKEFRHLLKTKRLKVNPLNSSKVGIPQGSGISAVCSNIRLINFDKEMYTWTESLNGIYRRYCDDLIWVIPKTEDLSIEKIESEIYKKIDSYGDLILQKEKTIILSYENNIMLNRNYRKSHLDYLGFLFDGSTIKIREKSLFKYFSRAYKKVRVVAREQIKHNRNAYMKDVYSLYTHLGFNYKGRGNFITYALKAQKLMEDLPVNVQIKNQVKRHWKKIHKKLDYYKSNF

SEQ ID NO: 380 - protein, 479 aa, Rhizobium azibense
MKPWIPTVRRYPHFDPVISAEEAEAIATNPALVAKHTFYPFLKYDEGWTAFANKGKPGRRKDRPIRYAARLDSCIFSYYRHLLSQPYEQRLVAEGLAGSVIAYRRILKPSGLGGQSNVEFALSAVEAIRSQKDCCTLALDISSFFESLDHSSLRMVWADLIGLSRLPEDHFKVYEAITKYAYVELEQAYQRLGFYGDKKDRHGKIRPGYLRSLKEMPVQLCDGRTFRIKIASDGGLPSIINVNNERKGVPQGAPLSDLLANAYLLEFDKFVRGLCASVGGTYFRYSDDILIVAPISAEQALEMERNVRAAISALGTGLVIKEEKSAIHRFDDGNGRQSISVVRAFDKDGKPMLNKPFEYLGFRYDGRRVFIRDKTMSNLHRKIASVCRASAIRMVKRYQGKTADEILEMADVERLIQAFGPVEDFRSKAVDYRAWTFTTYAKRASRVMGTLGKPIARQLSGLRQSIRNRLASELQRAAS

SEQ ID NO: 381 - protein, 460 aa, Salinicoccus cyprini
MKQSDGPRQSHDLSSSSNINWDKYEIKGYLHFDEQISIRHMKHKLQNEKWVSSYAFWPFIHFKLNFKKYIKVNEFDDQGNSIKKKEKKTRNIYYAAHKDGYIYKYYGDMLNNAYNSYAYKQKFDKNIIAYRNNKIGKNNIDFAYEVFEHLFKFDNAVVISIDFTKYFDNIVHRTLKRNLCRVLEVESLSDDWYRVYKNLTKYSWVNKEDLDEFLEKKYRSKLKKKIKTRKIKRIMSPIEFREIKEQKLVYYNKNKYGIPQGSSMSAVCSNVHLIDFDEELKKWCENKSGNAMYRRYCDDLIIVVPVEKKEDSLQEIKDELLCIIEKYKKDGLEVQEEKTEIRFWDGKSVMDESFKPSSLDYLGFVTDGKMIQLREKSLFNYYTRAYRKAKTVKRIEYATNRPGPKKDLYDLYTHLGFQYKGYGNFIKYANKAHKRMSKLPVKSVIQKQIKRHWRKIHKRI

SEQ ID NO: 382 - protein, 460 aa, Psychrobacillus soli
MKRSKGPRRLHNLPSSSNINWSKYKQKNYLHFDERIKIEHMKSKLQDSEWVASYAFLPSIHFEIIFKKYVTIPELYDHVKKSKRKEKKKKVRKIFYSAHKDSYIYKYYGDLLNNSYNTFAEDNNIDEIAVAYRNNKEGKNSVNFAHEVFEHLFKQEHAVIISMDFTSFFDNISHKTLKNNIKRVLNVDSLSDDWYKVFRSLTKFTYVNKTDINHFLKTKHGEKKVKKIKLSKIMEPIEFREFKKEHLHVNRKNFGIPQGSGMSAVCSNVHLIDFDKEMMQWAKQKHEKSLYRRYCDDLILVIPISNQSTDTVHSIRDELLDIMEKYKEDGLDIQKEKTEIRLYQNGDILNEQLQPATLDYLGFVTNGKLIKIREKSLFKYYSRAYRKANTSKRISFATGRPGPKKELYDLYTHLGYQYKDYGNFISYAYKAHRKMNQLPVRSMIRRQVKRHWSRVQKRMK

SEQ ID NO: 383 - protein, 427 aa, Chromobacterium amazonense
MKRSKHPWFRPRGYVHFDSPLGQAAAENLVTNPDAVATHAFYPFMRYIVETQKVNKDKATGLVLQKPPKKRPISFSAHADAHIYSYYASLLAAPYEENLRKRGLEGSILAFRSLGKSNIDFANDAFELIKEMGECVAFATDISGFFDNLDHLHLKKAWTRLLGLESLPADHYSVFRSLTKYSYVNLEDVLKTLGLSANNPPRSPERLCSPQIFREKIRGSGLVKQHREAKGIPQGSPISALLSNIYLLEFDKRLYDEITRRGGHYMRYCDDILCIVPTDNAENLFDYVDGLISEYGLDINELKTDTIHFAKVSGALKAERPLQYLGFTFDGVHKLIRSSAFAKFSDKMRRGVNLAYQTTKKHNKTRKKATRIWRQNLYERYSHLGNRNFVRYGLRAAKKMNSQAIKKQLRPLWKRLEQKIAKADEEL

SEQ ID NO: 384 - protein, 478 aa, Agrobacterium tumefaciens
MKSWTASIRRYPHFDPVISAAEAEAVALDPRQVSSHKFYPFLKYDEGWTAYARKGEHGKRKDRPIRFAARLDSCIFSYYRSVLSKLYEERLAAEGLGSSVIAYRRILKSSGSGGQSNIEFALTAVQSIRSFESCCTVALDISSFFESLDHDRLREVWKELIGESRLPQDHFTVFRAITKYAFVNVKSAYERLGYYGEKTDRYGKVRLGYLKPKKEIPVQLCDGKTFREKIAGKGTLPSIIEVNKTGKGVPQGAPLSDLLANLYLFEFDKYVQNICNEKGGSYFRYSDDILIVAPISETDAISLEQEIRTAVGKFGEGLLIKEEKSAIHKFERIAGIQVASVIKASDKDGRTALNKPFEYLGFRYDGKSVFIRDKTMSNLHRKIASVCHATAIRLVKRYKGKSVDEILKLTDIEKLIQTFGPVKDFRSKVMDYRLWTFTTYAKRASRVMGNLGSPIPRQLSGLRRAIRNRLEFELQKLV

SEQ ID NO: 385 - protein, 478 aa, Agrobacterium tumefaciens
MKSWTASIRRYPHFDPVISAAEAEAVALDPRQVSSHKFYPFLKYDEGWTAYARKGEHGKRKDRPIRFAARLDSCIFSYYRSVLSKLYEERLAAEGLGSSVIAYRRILKSSGSGGQSNIEFALTAVQSIRSFESCCTVALDISSFFESLDHDRLREVWKELIGESRLPQDHFTVFRAITKYAFVNVKSAYERLGYYGEKTDRYGKVRLGYLKPKKEIPVQLCDGKTFREKIAGKGTLPSIIEVNKTGKGVPQGAPLSDLLANLYLFEFDKYVQNICNEKGGSYFRYSDDILIVAPISETDAISLEQEIRTAVGKFGEGLLIKEEKSAIHKFERTAGIQVASVIKASDKDGRTALNKPFEYLGFRYDGKSVFIRDKTMSNLHRKIASVCHATAIRLVKRYKGKSVDEILKLTDIEKLIQTFGPVKDFRSKVMDYRLWTFTTYAKRASRVMGNLGSPIPRQLSGLRRAIRNRLEFELQKLV

SEQ ID NO: 386 - protein, 478 aa, Agrobacterium tumefaciens; identical to SEQ ID NO: 385

SEQ ID NO: 387 - protein, 478 aa, Agrobacterium sp.
MKSWTASIRRYPHFDPVISAAEAEAVALDPRQVSSHKFYPFLKYDEGWTAYARKGEHGKRKDRPIRFAARLDSCIFSYYRSVLSKLYEERLAAEGLGSSVIAYRRILKSSGSGGQSNIEFALTAVQSIRSFGNCCTVALDISSFFESLDHDRLREVWKELIGESRLPQDHFTVFRAITKYAFVNVKSAYERLGYYGEKTDRYGKVRLGYLKPKKEIPVQLCDGKTFREKIAGKGTLPSIIEVNKTGRGVPQGAPLSDLLANLYLFEFDKYVQNICNEKGGSYFRYSDDILIVAPISETDAISLEQEIRTAVGKYGGGLLIKEEKSAIHKFERTAGIQVASVIKASDKDGRTALNKPFEYLGFRYDGKSVFIRDKTMSNLHRKIASVCHATAIRLVKRYKGKSVDEILKLTDMEKLIQTFGPVKDFRSKAMDYRLWTFTTYAKRASRVMGNLGSPIPRQLSGLRRAIRNRLEFELQKVV

SEQ ID NO: 388 - protein, 465 aa, Lysinibacillus sphaericus
MKWSNGPQQLHNLSSSSNINWEKYRFKGYLHFDERIHIGHMKANLLNKDWVASYAFLPFIHFEMNFKRFVTIKEIDEQGQVTKRKERGEPKKRKIFYSAHKDGYIYKYYGDLLNNAYNIYASENEIDDNVVAYRNNKLGKNNIDFAFEVFNHLFKFENAVVISSDFTKYFDNISHQTLKRNIRKVLGVETLKRDWYQVYKNLTQFTYVKREDIDKFLEEKYGRTLNKKIKTHQINRIMTSSEFREFKKKYLEPNPNPDSYGIPQGSSMSAVCSNVHLIDFDKEISDWCKQKSANAMYRRYCDDLIVIIPLEKPSTTEFVTIRKELFGIIDKYKSDGLDVQQKKTEIRLWNGDSILDEQLQPSKLDYLGFVTDGQMIQLREKSLFNYYTRAYRKAKTVKRIEYATERPGPKRSLYDLYTHLGFEYKKRGNFVTYAYKAHKKMCQLPVKSLIKKQVKRHWGRIHRRL

SEQ ID NO: 389 - protein, 424 aa, Photorhabdus namnaonensis
MKYPDHPWYKSRGYLHFDNPVTLLHALDVVTNPQYIATHSFLPFISFTAKSYKIRKDPLTNLLARKCKPREIAYSSHMDSHIFSYYASILDSFYELEVKKHGVDKNILAFRKLEKSNIEFAYEAFEEIKIRKNCSAVSLDLSKFFDTLDHNILKNAWCKLISESSLPADHYAVFKNITKFSKVDKDQLYPLFGISKHNPKHNRRKICSSDEFRVKARSLIITNKSGRGIPQGSPISALLSNIYMLNFDIEMKSYVESIGGEYFRYCDDMLFIVPIEQKNKVAGEAKKRLKGLKVDLNTDKTEIREFTAHVSGKISCDKPLQYLGFLFDGNNIYLRSSSLSRYSDRMKRGVKLAKSTMRSKNKVRISKNLPEKDLFKEKIYARYAHVGKRNFLSYGYRAARTMNSKSIRKQLKPLWERLQRELEK

SEQ ID NO: 390 - protein, 428 aa, Providencia rustigianii
MKYPEHLWFRKRGYLHFDKPISLEHALNIVTNPYTVATHSFLPFITFTSSTYKIQKDKGTNSINKMLKERPIAYSSHIDSHIYSYYASILDELYENELQTYNITKNILAFRALNKSNIEFAHEAFQEIKKIGSCSAVALDLSKFFDTLNHNLLKDAWCKLLRKDKLPEDHYAVFKAITKYSKVDKEKLYDLMSIPKNNTKNTKKTRKQICSFVDFRNKVRKSNLIIPNKSALGIPQGSPISALLSNIYMLNFDIEINKYISSLGGKYFRYCDDMLFIVPTHEKNNIAGEAEKRLNKLKVHLNTKKTEIREFSFTSTKIKCDKPLQYLGFIFDGENIFLRSSSLSRYSDRMKRGVRLAKATMIRKNKIRKYKGLSTKELFKEKIYARYAHVGKRNFLTYGYRASRIMNSNSIRKQLKPLWERLQKEINK

SEQ ID NO: 391 - protein, 425 aa, Chitinimonas sp.
MLDTPTWFRQRRYLHFDEPLSLQKAMALVTNPNAVATHAFWPLIRFNVHTTKIKQNKTTGHLDWHHKDREISYAAHSDSLIFGFYAERIGALYELHLAKQGLADCVLAFRSLGKNNINFAKSAFDEISVRGNCVAVALDVTKFFDTIDHAQLKLRWKQLLGISELPSDHFAVYKALTKFAYVDRDEVFGALGISVHNPRGNGKYRLCSPTNFRGQVRDAKLIKTNPNKCGIPQGTAISALLSNVYMLEFDAVANAFATAHGGKYMRYCDDILFVMPVELASETESFCISEIGKLELKINPDKTDTCVFTKNGASLVCNKPLQYLGFLFDGQQTIIRSAAFAKFSNHMKRGVSLAKQTMRSRNKAKIANGADEKTLYRRKLLSRYSHLGSRNFLRYGYKAAKVMNSKAIRRQLRPLWGRLQRAIEK

SEQ ID NO: 392 - protein, 432 aa, Plesiomonas shigelloides
MLIPKDEWYLHRGYLHFDLPISYKKAKFLVTNPASVAVHPFLPLIGYTISSKKVKRDRSTNALEIKHKEREIAYSSHVDSHIYAYYACMLKRLYEASIKLAKIDDSVLAFRELGKSNIDFANQAFNKIKEFGECSVVALDFSKFFDSLNHDLLKSKLAALLSCEKLPSDYFNVFKSLTKYSKVDRFKLYSLFNISENNPKNGRNRVCSIDEFRRVVRANKLIVANDDGFGIPQGTPISALLSNIYMYDFDISMRAFVNEVGGTYYRYCDDMLFIVPIDKKDSVITFAKEQVTKIKVQINDDKTEVRTFIKDSISGQLKADKPLQYLGFMFDGENAYIRSSSLSRYSDKLKRGVRLANKTKIKYNSIRVSNGLEERSLYKRKLYSRYTHLGGRNFITYGLRAARTMNSKTIKRQLKPRWAKFHQELSKYSKET

SEQ ID NO: 393 - protein, 467 aa, Acinetobacter modestus
MLNFEEYKEQIYDKRHLSKGPHGNRPKSRIHFDMPLDAKSAFSLVSNPDKVAKHWFLPFIGFEQSVRKIRNHNGLSRRKAKIRPLRYSANRDGYIYAYYSYILDKQYENLINKTSLDTSILAYRSLGKSNVDFAKEVFDWIERAQECNVLAIDLSSFFDTLDHDILKKQWQRVNGVSNLSKDNYMVFKSLTHYSFLDIEEALSVLGWPDKLSRKRLGKSIPNPLRKETSARHQSIEDFQSIKKYKSVNPDGSYKYLVQIPEKKNGKRYGIPQGSPMSATLSNIYMLDFDQQCCDLMASIGGIYRRYCDDIIVIFPKNIHINDIYSKLKHFLIDHGGPQLRINDEKVEKIQFVKKLGVLTAIDAVSLENKPLQYLGFIYDGQKILIRSSSLSNYYRRLVSKIQASKNKAKRNGTKTYRRKIYRMYSHLARKQRNFITYTYRASEAMDEILIKRQLSNHWKRIHDELKK

SEQ ID NO: 394 - protein, 467 aa, Acinetobacter modestus
MLNFNQYKEEIYDKKHRINDSHNNRLKSRVHFDTPLDVHSAFELVSNPDKVSKHWFLPFIGFDQSVRKIRRHNGLTRRVSKVRPLRYAANKDGYIYAYYSYLLDRQYENLIKKTSLNNSVLAYRSLGKSNVDFAKEVFDWIAQTQGCNALTVDLSSFFDTLDHEILKKQWQKVNNVDRLSQDNYMVFKSLTNYSFMNIEDALLALGWSDKFNRKRLGEKIPNPLRKKTSAYHQSLKDFRDIRKYKFLGPNESFKYLIQFPERIEGKRYGIPQGSPMSAVLSNIYMLDFDYHCCDLMEKIGGLYRRYCDDIIVLFPENVQINDIYIALQSALGELGGSQLKINPTKVEKIQFINESGQLKAVDASTKVDKPLQYLGFTYNGKKILIRSSSISNYYRRLVSKIRSSKNKASQNNSILYRRKIYRMYSHLARKQRNFITYAYRASETMEDSFIKRQLSNHWQRIHHEINK

SEQ ID NO: 395 - protein, 463 aa, Larkinella punicea
MLNQAIKIWSEKAQQLRANKKRGYIHFDQKPNLVNVCKVVSNPQEIAGHHFYPFIEKIILTPRYKKDKDSGERKKDTKERSVMYASHMDAHIYSYYNILLELAYEEKIKEEAYSKFILAYRKFKDESGKGKCNIHFAHELFEAVKEKGECVILAFDISNFYTNLDHKLLLKSWKDILGVDNLPEDHYNVFKSITRYSKVSRKILHEEFKIEDKQEKIKRLCTAEQFRDVVRKKGFIVPNKEGKGIPQGAPMSGLLSNLYMLNFDKMAYQEIFEKQNGLYRRYSDDIIVVCSTQQQREIENWIKCEISNQLKLEINTDKTEVTYIKLSDDGSLRAFKDFEGNIRRNAQYLGFEFNGKNCFIRSSSLARYYRRMKMRVRMAKKRAERTTALNKIVFKKKLLIRNSDYIFKIQQGSNKASKSKYLTANFVTYAQKAAKSMKEDKINKQISPHLKKLHQEVLKKIIK

SEQ ID NO: 396 - protein, 424 aa, Aeromonas hydrophila
MLNSNDRWFRSRGYLHFDAPVKLRKARKIVSSPEHVSKHAFLPLISYSIESYKAHLNENGEIVKKRKPRPVSYASHIDSHIYSYYAEKLSELYEGVLVSSSLNDSVLAFRSLKKSNIDFANEAFDKIKKHGNCTAIAMDITGFFDNLDHGILKSMWSKVLKVERLPSDHFNIFRSLTKSSTVQRDVLFEKLEISKNNPKKAGFRLCDIKKFREIVRGRDLIKTNKSSKGIPQGTSISALLSNIYMLDFDSEIKHIVTSMGGSYYRYCDDMLFIIDSEKRDTLIKTVTESISTLKIDINKDKTEIRNFYITHGIQKSDKPLQYLGFIFDGERKLIRSAALARFSGRMKAGVRLAKKAHSKANTIEEEKGVSQTPLFKKKIYERYSHLSKRNFITYGHMAAKKMNSKAIKKQLKPLWGRLVREIDK

SEQ ID NO: 397 - protein, 499 aa, Alphaproteobacteria bacterium HGW-Alphaproteobacteria-2
MLRPHSWRAMEDEFDFTAEDLKHYPHFDAPLSLREIRRLVTSPERVAANSFYPFFLYEESWQPYRSADAAKPEKKTRPIRYGARRDAYIFAFYRRKLSRLYEARLRALGIEDCPIAYRQVSKEGRGGGKCNIDFAKDAFDEIDRLGDCGAVALDIKGYFENLDHRRIKKIWCDLLGVAELPPDHYAVFKNITKYHFVDQRTTYRRLGYFGLRERNGEMVEGFLRPYRDMPKQLCSNADFRAKICGGDPSYPSIIQKNDLPHGVPQGAPISDLIANFYLLDFDVVMAGYARARGGRYMRYSDDILLILPGGPSEASAAIDFATTEMRKHGPELRIKEAKTCVAQFQRAPDGLRFYHLKQRSDETTKNGFEYLGFRYDGRRVYVRDSTISRFYSKVAGAAKRDGRRHIEKNPSLDAGALIGCFDFPLFSQRFSKVKKENLTSDYRSWTFYSYLKRSAEAFGPKGDRILKQARGFDKFMRARVTEAIVRAVAKRKAPATESA

SEQ ID NO: 398 - protein, 425 aa, Telluria aromaticivorans
MLSKKEPWFRRRGYTHFDRPVSCLTASKIVTDPQRVAKRGFLPFIDFDIVTSKVKWCDDLRRLVRKSKPRKVAYASHIDSHIFSYYCHLLTSKYEGELNKRGLNTNVLAFRTLGKSNINFAAEAFSSIAEHSECHVLGLDIKGFFDNLDHAILKSQWASVLGMNVLPHDHYAVFRALTRYSMVNLDATLDILGLSKHNQRAAGLRLCSPEDFREKIRSAKIIRKHSDVKGIPQGSSISALLSNIYMLEFDERIARYVGSVGGKYFRYCDDMLFIVPPNEASNCEKFATDYISGIKLGIQPSKTERRHFQTINGCLRSEKPLQYLGFLFDGQRVLLRSASLARYSDRLRRGVKLAKATMRKRNQLRIDRGGEPRPLFMKSLLRKYTYFGRRNFISYGYRAAQYLDSKEIRKQLRPLWKRFQKELMR

SEQ ID NO: 399 - protein, 440 aa, Neisseria zalophi
MNDYPWFKKRGYLHFDSPMNEEQAYKLVSSPRNVITNSFYPFISHKLSIPKLKKDEDGKLTRDPKPREISYASHKDSHIFSYYAYLLNEKYEELLKNEFKSINNSVLAFRKLGKNNIDFAFQAFKYIKEVKNCTAIALDISNFFGNLDHKILKEKWCKVLGKERLPDDHFSVFKAITQYTTISRDKIYEEFNISLHTPRSNNRKKICSPKEFRELRNKNRTLFENKLFISNKNKGIPQGSPISALLSNIYMIDFDIKLNKKIMELQGLYLRYCDDILCIVPTSEIHNIKEFIEKEKEFIEKEIDNLNLKINSKKTEIISFEYDLNKQKIINEKRLQYLGFILHNESITIRPAAFTKYSRKMKRGVSLAKQTQRKYNRIRQKNNQDNKELFKKKLYTTYSHFGKRNFISYGKKAAKTMNSPQIRKQLKPLWKKLQSKIESE

SEQ ID NO: 400 - protein, 430 aa, Bacillus subtilis
MNEKKYRVKGYKHLDNKKSIEKVKSKIQNPRWVAKHGFYPFMHFEIKFQKYSRKEKKRKEKVRKIFYASHMDSYIYKYYGDKLNNHYNSVVDELGINEVATAYRNNLSGKSNINFAKEVIDFIKVQQSAYIFVADFTNFFDTLDHRYLKEKIRYVLKKDTLPDDYYNVFKNITRFSYFIKDTIEAELKTKYTESEIESSYKYFTEKEFRAFKHKNIYKNSKRYGIPQGAGISSVCSNIYLLDFDKKIQKYVKEQNGLYRRYCDDLIIVIPIEGGIQDYNYQIHQKILEDIKEQIPNLEIQLEKTGNYFYNDNQIIDLDLNETILDYLGFSFNGKEVRIREKSLFKYYTRAYRKVRICNRKSKKFGRKSYRRELYKNYSHLGKSKKGHGNFISYVERAQKIFDEDSKTINLMETQVKKHWKNIQSRLEQPE

SEQ ID NO: 401 - protein, 466 aa, Acinetobacter johnsonii
MNFEQYKEEIYDKKHLSKDSYGSRPKSRIHFDMPLDAQSAFSLVSNPDKVAKHWFLPFIGFEQNIRKIRNHNGLTRRKAKIRPLRYSANKDGYIYAYYSYILDKQYESLIKGSPLDKAVLAYRSLGKSNVDFAKEVFDWIAQTQGCNVLTIDLSSFFDTLDHEILKKQWQRVNGVSSLSKDNYIVFKSLTHYSFLNIEDTLTALGWPDRLTRKNLNKKIPNPLRKEISARHQSMEDFRSIRKHKFFNSDGTFKYLIQTPEKIAGKRYGIPQGSPMSAILSNIYMLDFDQNCCDLMTQIGGIYRRYCDDIVVTFPESISIDEIYNKLEKALSAHGGQQLKINPAKVEKIQFSHVTTRLTAIDVTTGIYKPLQYLGFIYDGEKVLIRSSSLSNYYRRLVSKIRASKNRAKRHKKIVYRRKIYRMYSHLARKQRNFITYAYKASETMDDVLIKKQLSNHWRRIHDEIKK

SEQ ID NO: 402 - protein, 297 aa, Vibrio paracholerae
MGECSAVALDFSKFFDTLDHDLLKQSWANLLGEKNLPSDHFNVFKSITNFSQVNKEELYKEFGISPNNPKNGRNRVCTAQEFRDVVRNKKLIKTNKGSFGIPQGSPISALLSNIYMFEFDAEMKRYMDIHGGKYYRYCDDMLFIVPAPLRDKVAGYAQEQVKNLKVSINPKKTELRTFSSQGGILVADQMLQYLGFMFDGENVYIRSSSLARYSEKMKRGIRLAKKTMDKYNAVRVAKGLPEKSLYKRKLYSRYTHLGGRNFVTYALRAASAMQSKTIKRQLKPLWRRFHEELEKET

SEQ ID NO: 403 - protein, 297 aa, Vibrio paracholerae; identical to SEQ ID NO: 402

SEQ ID NO: 404 - protein, 427 aa, Vibrio tasmaniensis; identical to SEQ ID NO: 13

SEQ ID NO: 405 - protein, 427 aa, Vibrio metoecus; identical to SEQ ID NO: 15

SEQ ID NO: 406 - protein, 427 aa, Vibrio harveyi; identical to SEQ ID NO: 17

SEQ ID NO: 407 - protein, 427 aa, Pseudomonas sp.; identical to SEQ ID NO: 18

SEQ ID NO: 408 - protein, 427 aa, Vibrio atlanticus; identical to SEQ ID NO: 20

SEQ ID NO: 409 - protein, 427 aa, Pseudomonas resinovorans; identical to SEQ ID NO: 22

SEQ ID NO: 410 - protein, 427 aa, Stutzerimonas stutzeri; identical to SEQ ID NO: 10

SEQ ID NO: 411 - protein, 427 aa, Vibrio alginolyticus; identical to SEQ ID NO: 24

SEQ ID NO: 412 - protein, 427 aa, Vibrio sp.; identical to SEQ ID NO: 29

SEQ ID NO: 413 - protein, 427 aa, Vibrio splendidus
MSSNIPLWYRNRGYLHFDLPISLKKARNLVTNSDLVAKHAFFPLINYAVESKKISKDKKTRKIDIAVKERPIAYSAHVDSHIYAYYAEILSRKYESRLKQLGLSECILAFRGLGKSNIDFAFEAFEQIKDMGECSAVALDFSKFFDTLDHSILKQSWAGLLGKDKLPPDHFNVFKSITKFAQVNKVDLYNEFGISPNNPKNGRNRICTAKEFRDIVRTKKLIKPNKNSFGIPQGSPISALLSNIYMLEFDAEMKRYVDIHGGKYYRYCDDMLFIVPTPLKVRVAGYAQDRIKSLKVSINPKKTELRTFKYKNGSLTSEQMLQYLGFMFDGENVYIRSSSLARYSEKMKRGIRLAKRTMDKYNSVRITKGLPEKKLYKRKLYSRYTHLGGRNFVTYGLRAAKTMQSKTIKRQLKPLWRRFHEEIEREI

SEQ ID NO: 414 - protein, 427 aa, Vibrio splendidus; identical to SEQ ID NO: 413

SEQ ID NO: 415 - protein, 427 aa, Photobacterium damselae; identical to SEQ ID NO: 32

SEQ ID NO: 416 - protein, 427 aa, Vibrio pectenicida; identical to SEQ ID NO: 33

SEQ ID NO: 417 - protein, 282 aa, Klebsiella pneumoniae; identical to SEQ ID NO: 34

SEQ ID NO: 418 - protein, 307 aa, Vibrio parahaemolyticus; identical to SEQ ID NO: 37

SEQ ID NO: 419 - protein, 427 aa, Vibrio parahaemolyticus
MSSNKPLWYRSRGYLHFDLPVSFKKAKNLVTNPDLVSKHAFFPLINYAVESKKISKNKDTRKIDVAVKERPIAYSSHMDSHIYAFYANLLSKKYEAKLKSAGLAESILAFRGLGKSNVDFAFEAFEQIKVMGECSAVALDFSKFFDTLDHDLLKQSWANLLGEKNLPSDHFNVFKSITKFSKVNKVELYKEFGISPNNPKNGRNRVCTVQEFRDVVRKKKLIKTNKDPFGIPQGSPISALLSNIYMFEFDAEMKRYMDIHGGKYYRYCDDMLFIVPAPLRDKVAGYAQEQVKKLKVSINPKKTELRTFSSQGDILVADQMLQYLGFMFDGENVYIRSSSLARYSEKMKRGIRLAKKTMDKYNAVRAAKGLPEKALYKRKLYSRYTHLGGRNFVTYGLRAASTMHSKTIKRQLKPLWRRFHEELERET

SEQ ID NO: 420 - protein, 427 aa, Vibrio parahaemolyticus; identical to SEQ ID NO: 419

SEQ ID NO: 421 - protein, 427 aa, Vibrio cholerae
MSSNKPLWYRSRGYLHFDLPVSINKAKNLVTNPDLVSKHAFFPLISYTVESKKISKNKDTRKIDVAVKQRPIAYSSHMDSHIYAFYANLLSKKYEAKLKSAGLTESILAFRGLGKSNIDFAFEAFEQIKTMGECSAVALDSSKFFDTLDHDLLKQSWANLLGEKKLPSDHFNVFKSITKFSQVNKEELYKEFGISPNNPKNGRNRVCTAQEFRDVVRNKKLIKTNKGSFGIPQGSPISALLSNIYMFEFDAEMKRYMDIHGGKYYRYCDDMLFIVPAPLRDKVAGYAQEQVKNLKVSINPKKTELRTFSSQGGILVADQMLQYLGFMFDGENVYIRSSSLARYSEKMKRGIRLAKKTMDKYNAVRVAKGLPEKSLYKRKLYSRYTHLGGRNFVTYGLRAASAMQSKTIKRQLKPLWRRFHEELEKET

SEQ ID NO: 422 - protein, 427 aa, Vibrio cholerae; identical to SEQ ID NO: 421

SEQ ID NO: 423 - protein, 427 aa, Vibrio parahaemolyticus
MSSNKPLWYRSRGYLHFDLPVSFKKAKNLVTNPDLVSKHAFFPLINYAVESKKISKNKDTRKIDVAVKERPIAYSSHMDSHIYAFYANLLSKKYEAKLKSAGLTESILAFRGLGKSNIDFAFEAFEQIKIMGECSAVALDFSKFFDTLDHDLLKQSWASLLGEKNLPPDHFNVFKSITKFSKVNKVELYKEFGISPNNPKNGRNRVCTAQEFRDVVRRKMLIKTNKDPFGIPQGSPISALLSNIYMFEFDAEMKRYMDIHGGKYYRYCDDMLFIVPAPLRDKVAGYAQEQVKKLKVSINPKKTELRTFSSQGDILVADQMLQYLGFMFDGENVYIRSSSLARYSEKMKRGIRLAKKTMDKYNAVRAAKGLPEEALYKRKLYSRYTHLGGRNFVTYGLRAASTMQSKTIKRQLKPLWRRFHEELERET

SEQ ID NO: 424 - protein, 427 aa, Vibrio cholerae
MSSNKPLWYRSRGYLHFDLPVSINKAKNLVTNPDLVSKHAFFPLISYTVESKKISKNKDTRKIDVAVKQRPIAYSSHMDSHIYAFYANLLSKKYEAKLKSAGLTESILAFRGLGKSNIDFAFEAFEQIKTMGECSAVALDFSKFFDTLDHDLLKQSWANLLGEKKLLSDHFNVFKSITKFSQVNKEELYKEFGISPNNPKNGRNRVCTAQEFRDVVRNKKLIKTNKGSFGIPQGSPISALLSNIYMFEFDAEMKRYMDIHGGKYYRYCDDMLFIVPAPLRDKVAGYAQEQVKNLKVSINPKKTELRTFSSQGGILVADQMLQYLGFMFDGENVYIRSSSLARYSEKMKRGIRLAKKTMDKYNAVRVAKGLPEKSLYKRKLYSRYTHLGGRNFVTYGLRAASAMQSKTIKRQLKPLWRRFHEELEKET

SEQ ID NO: 425 - protein, 423 aa, Burkholderia cepacia; identical to SEQ ID NO: 8

SEQ ID NO: 426 - protein, 273 aa, Klebsiella pneumoniae
MKHQWCKVIGTEALPQDHFAIYKSITRYSKVDKNRAYEILGISKNNPKYNRRKICTPVDFRNKIRKNGLIIVNNSQKGIPQGSPISALLSNIYMLDFDIEMRDYAQERGGHYYRYCDDMLFIVPTKYNKTLAGDVAQRIKHLKVELNTKKTEIRDFIYKDSTLVANMPLQYLGFIFDGSNILLRSSSLARYSERMKRGVRLAKATMDSKNRIRENKGEALKALFKKKLYARYSHIGRRNFLTYGYRAAKIMNSKAIKRQLKPLQKRLENEILK

SEQ ID NO: 427 - protein, 392 aa, Klebsiella pneumoniae
MNNDDYPWFRKRGYLHFDEPVSLKKAVKYVSSPEKIIKHSFLPFLSFEVKSFKIKKDKSTKQLSKTEKLRPIAYSSHLDSHIYAFYAEYLTGHYELLIQENNLHENILAFRSLNKSNIEFAKRAFDTITEMGECSAVALDLSGFFDNLDHQILKHQWCKVIGTEALPQDHFAIYKSITRYSKVDKNRAYEILGISKNNPKYNRRKICTPVDFRNKIRKNGLIIVNNSQKGIPQGSPISALLSNIYMLDFDIEMRDYAQERGGHYYRYCDDMLFIVPTKYNKTLAGDVAQRIKHLKVELNTKKTEIRDFIYKDSTLVANMPLQYLGFIFDGSNILLRSSSLARYSERMKRGVRLAKATMDSKNRIRENKGEALKALFKKNYMPDIHILEEGIF

SEQ ID NO: 428 - protein, 329 aa, Klebsiella pneumoniae
MIQENNLHENILAFRSLNKSNIEFAKRAFDTITEMGECSAVALDLSGFFDNLDHQILKHQWCKVIGTEALPQDHFAIYKSITRYSKVDKNRAYEILGISKNNPKYNRRKICTPVDFRNKIRKNGLIIVNNSQKGIPQGSPISALLSNIYMLDFDIEMRDYAQERGGHYYRYCDDMLFIVPTKYNKTLAGDVAQRIKHLKVELNTKKTEIRDFIYKDSTLVANMPLQYLGFIFDGSNILLRSSSLARYSERMKRGVRLAKATMDSKNRIRENKGEALKALFKKKLYARYSHIGRRNFLTYGYRAAKIMNSKAIKRQLKPLQKRLENEILK

SEQ ID NO: 429 - protein, 427 aa, Vibrio alginolyticus
MSSNKPLWYRSRGYLHFDLPVSFKKAKNLVTNPDLVSKHAFFPLINYAVESKKISKNKETRKIDVAVKERPIAYSSHMDSHIYAFYANLLSKKYEAKLKSAGLTESILAFRGLGKSNIDFAFEAFEQIKIMGECSAVALDFSKFFDTLDHDLLKQSWASLLGEKNLPPDHFNVFKSITKFSKVNKVELYKEFGISPNNPKNGRNRVCTAQEFRDVVRRKKLIKTNKDPFGIPQGSPISALLSNIYMFEFDAEMKRYMDIHGGKYYRYCDDMLFIVPAPLRDKVAGYAQEQVKKLKVSINPKKTELRTFSSQGDILVADQMLQYLGFMFDGENVYIRSSSLARYSEKMKRGIRLAKKTMDKYNAVRAAKGLPEKALYKRKLYSRYTHLGGRNFVTYGLRAASTMQSKTIKRQLKPLWRRFHEELERET

SEQ ID NO: 430 - protein, 427 aa, Vibrio parahaemolyticus
MSAKSPTWYRSRGYLHFDLPISSVKAKRLVTNPELVAKHAFFPLINYSVESKKISKDKASSRIDVTYKERPIAYSSHVDSHIYAYYAELLSVKYESKLKELELSECVLAFRGLGKSNIDFAHEAFEQIKNMGECSAVALDFSKFFDTLDHELLKKSWAAILDTNKLPNDHFNVFKSITKFSKVNKVDLYNEFSISNNNPKKGRNRVCSSKEFRDVVRTKKLIKTNQDSFGIPQGSPISALLSNIYMLEFDAEMNRYVKMYGGKYYRYCDDMLFIVPTGQKKKVAGYAQKKVKGLKVSINPKKTELRTFTKQGNILVADQMLQYLGFMFDGENAYIRSSSLARYSEKMKRGIRLAKKTMVKYNAIRQSKGLDEQPLYKRKLYSRYTHLGGRNFITYGLRAADTMGSKTIKRQLKPLWRRFNEELKKET

SEQ ID NO: 431 - protein, 427 aa, Vibrio chagasii
MSSNIPLWYRSRGYLHFDLPISLKKARNLVTNPDLVSKHAFFPLISYAVESKKISKNKKTRKIDIAVKERPIAYSAHVDSHIYAYYANLLSRKYESRLKSAGLSDCILAFRGLGKSNIDFAFEAFEEIKKMGECSAVALDFSKFFDTLDHSILKQSWANLLGEEKLPPDHFNVFKSITKFSQVNKVDLYKEFGISPNNPKNGRTRVCTAQEFRDVVRKKKLIKPNKNSFGVPQGSPISALLSNIYMFEFDAEMKKYMDIHGGKYYRYCDDMLFIVPAPLRDKVAGFAQERVKSLEVTINTKKTELRTFKYKNDVLVTDQMLQYLGFMFDGENAYIRSSSLARYSEKMKRGVRLAKRTMDKYNAVRLTKGLPEKDLYKRKLYSRYTHLGGRNFVTYGLRAAKTMQSKTIKRQLKPLWRRFHEELERET

SEQ ID NO: 432 - protein, 427 aa, Vibrio chagasii; identical to SEQ ID NO: 431

SEQ ID NO: 433 - protein, 428 aa, Pseudomonas putida; identical to SEQ ID NO: 45

SEQ ID NO: 434 - protein, 163 aa, Klebsiella pneumoniae
MNNDDYPWFRKRGYLHFDEPVSLKKAVKYVSSPEKIIKHSFLPFLSFEVKSFKIKKDKSTKQLSKTEKLRPIAYSSHLDSHIYAFYAEYLTGHYELLIQENNLHENILAFRSLNKSNIEFAKRAFDTITEMGECSAVALDLSGFFRQFRSSNFETPVVQSYWD

SEQ ID NO: 435 - protein, 96 aa, Klebsiella pneumoniae
MNNDDYPWFRKRGYLHFDEPVSLKKAVKYVSSPEKIIKHSFLPFLSFEVKSFKIKKDKSTKQLSKTEKLRPIAYSSHLDSHIYAFYAEYLTGHYEL

SEQ ID NO: 436 - protein, 425 aa, Klebsiella pneumoniae; identical to SEQ ID NO: 3

SEQ ID NO: 437 - protein, 83 aa, Vibrio parahaemolyticus
MKKMSVPLWYTKRNYLHFDVPVSGTKAEKIVTSTTSVARHAFFPFISYSFQLTKLDRDRSTGKLYRKPKPRGVAYSSHIDSHI

SEQ ID NO: 438 - protein, 69 aa, Vibrio parahaemolyticus
MKKMSVPLWYTKRNYLHFDVPVSGTKAEKIVTSTTSVARHAFFPFISYSFQLTKLDRDRSTGKLYRKPK

SEQ ID NO: 439 - protein, 205 aa, Arsenophonus sp.
MITPNKTNFGIPQGSPISALLSNIYMLNFDIEMNNYVSLLGGVYFRYCDDMLFIVPSHEKNNVADEAQKRLLKLKVSLNTKKTEIRKFVATPSKIKCDKPLQYLGFIFDGDNIFLRSSSLSRYSDRMKRGVRLAKATMKRKNKIRKFKGLPKKELFKKKIYARYAHVGRRNFLTYGYRASRIMHSNSIRKQLKPLWERLQKEINK

SEQ ID NO: 440 - protein, 304 aa, Vibrio parahaemolyticus
MKECSVIALDFSKFFNTLDHRILKEEWSKLLQVKHLPKDHYNVFRSLTKFSTVERDELFKTFGISQYNQKANGRNRVCTPLEFREKVRGSGLINPNPNGAMGIPQGSPISALLSNIYMFSFDKHMKNYVDSIGGKYFRYCDDMLFIVPSEYRDTVEKLANSKIAALKVQINSDKTEIRDFKFHNGQLCSFDEFGKQKPLQYLGFLFDGHSIFLRSTALARYSEKMKGGVKLAKKTMEKENRIRKSKGEPEQNQLYKRKLHRLYSYRGRRNFLSYGYRAAKIMNSKSIKRQLKPLWQRLQDEISK

SEQ ID NO: 441 - protein, 429 aa, Enterobacter kobei
MESREHPWFRKRGYLHFDKPISIEHALDIVTNPRAVAAHSFLPFITFTSTTYKVQKDKGTNAINKTLKERPIAYSSHVDSHIYSYYAATLNELYENALQIHGISKNVLAFRSLSKSNIEFAYDAFQEIKKRGECSAVALDLSKFFDTLDHSFLKDAWCRLLSTDKLPEDHYAVFKAITKYSKVDKEKVYDLMGIPKNNARYTKKTRKQICSFVDFRDKVRKNALIISNKANFGIPQGSPISALLSNIYMLNFDIEMKDYVATLGGEYFRYCDDMLFIVPQSAKNNVAGEAEKRLNKLKVSLNTKKTEIREFSFASKKIKSDKPLQYLGFVFDGQNIFLRSSSLSRYSDRMKRGVRLAKATMKRKNNIRKHKGLAKKELFKEKIYARYAHVGKRNFLTYGYRASRIMKSNSIRKQLKPLWKRLQKEINRS

SEQ ID NO: 442 - protein, 429 aa, Enterobacter kobei
MESREHPWFRKRGYLHFDKPISIEHALDIVTNPRAVAAHSFLPFITFTSTTYKVQKDKGTNAINKTLKERPIAYSSHVDSHIYSYYAATLNELYENALQIHGISKNVLAFRSLHKSNIEFAYDAFQEIKKRGECSAVALDLSKFFDTLDHSFLKDAWCRLLSTDKLPEDHYAVFKAITRYSKVDKEKVYDLMDIPKNNAKYTKKTRKQICSFADFRDKIRKNALIISNKANFGIPQGSPISALLSNIYMLNFDIEMKDYVATLGGEYFRYCDDMLFIVPQSAKNNVAGEAEKRLNKLKVSLNTKKTEIREFSFVSKKIKCDKPLQYLGFVFDGQNIFLRSSSLSRYSDRMKRGVRLAKATMKRKNNIRKHKGLAKKELFKEKIYARYAHVGKRNFLTYGYRASRIMKSNSIRKQLKPLWERLQKEINRS

SEQ ID NO: 443 - protein, 205 aa, Arsenophonus apicola
MITPNKTNFGIPQGSPISALLSNIYMLNFDIEMNNYVSLLGGVYFRYCDDMLFIVPSHEKNNVADEAQKRLLKLKVSLNTKKTEIRKFVATPSKIKCDKPLQYLGFIFDGDNIFLRSSSLSRYSDRMKRGVRLAKATMKRKNKIRKFKGLPKKELFKKKIYARYSHVGRRNFLTYGYRASRIMHSNSIRKQLKPLWERLQKEINK

SEQ ID NO: 444 - protein, 428 aa, Vibrio sp.; identical to SEQ ID NO: 72

SEQ ID NO: 445 - protein, 428 aa, Vibrio campbellii
MERPSNNWYRLRSYLHFDPPISLKKATSIVTNPELVSRHAFYPLINYEIEIQKVSKDKLTKRVIKRPIKLRPIAYPAHLDSQIYSYYSYIISKEYENLLSESNLSDSILAFRKLGKSNIDFAFDAFCKIKDFGECSVVALDITGFFDNLNHEKLKKMWSKTIGEDRLPQDHFNVYKSLTKYSKVDRNTLYKLLGISLNYRNHTKVKLCEPKEFRESVRKSKLIKVNKDCFGIPQGTPISAMLSNLYMLDFDKNIKAFVDGFSGKYFRYCDDILIISPQDKKDAVIQHVKKEIELIKLSINEAKTEVRDFVLVDGNLYTPHHLQYLGFMFDGKNIYLRSSSLARYSERMRRGVRLAKKTMQKYNKQRIEEGKSERGLYKKKLYSRYTHLGKRNFITYGMRASKKMDSLEIKKQLKPLYSRLQEEINKKL

SEQ ID NO: 446 - protein, 428 aa, Vibrio owensii; identical to SEQ ID NO: 445

SEQ ID NO: 447 - protein, 428 aa, Vibrio jasicida
MERPSNNWYRLRSYLHFDPPISLKKATSIVTNPELVSRHAFYPLINYEIEIQKVSKDKLTKRVIKRPIKLRPIAYPAHLDSQIYSYYSYIISKEYENLLSESNLSDSILAFRKLGKSNIDFAFDAFCKIKDFGECSVVALDITGFFDNLNHEKLKKMWSKTIGEERLPQDHFNVYKSLTKYSKVDRNTLYKLLGISLNYRNHTKVKLCEPKEFRESVRKSKLIKVNKDCFGIPQGTPISAMLSNLYMLDFDKNIKAFVDGFSGKYFRYCDDILIISPQDKKDAVIQHVKKEIELIKLSINEAKTEVRDFVLVDGNLYTPHHLQYLGFMFDGKNIYLRSSSLARYSERMRRGVRLAKKTMQKYNKQRIEEGKSERGLYKKKLYSRYTHLGKRNFITYGMRASKKMDSLEIKKQLKPLYSRLQEEINKKL

SEQ ID NO: 448 - protein, 429 aa, Enterobacter roggenkampii; identical to SEQ ID NO: 74

SEQ ID NO: 449 - protein, 205 aa, Shewanella sp.
MFIPTDSDLPSWFKKRSYLHFDSKVSLDKTKEIVLNPKAVSSHAFYPFIKYSVISEKVSKDQKTNKISIKKKIRDVAYSSHMDSHIYSYYSEMLTDIYEKRLQEKNLHKAVLAFRKLDGKSNIHFAHDAFMYIKSKRECSAIALDFSKFFNTLDHKILQREWSNILKLEKLPDDHYKVFRSLTKYSEVNRDKLFEIFDIRHIIPN

SEQ ID NO: 450 - protein, 429 aa, Cupriavidus taiwanensis; identical to SEQ ID NO: 80

SEQ ID NO: 451 - protein, 426 aa, Pseudomonas aeruginosa; identical to SEQ ID NO: 85

SEQ ID NO: 452 - protein, 418 aa, Pseudomonas aeruginosa
MHFDRPINQAAALEIVSSPKTVAKHAFYPFIRYVAQTQKVFFDKSIGKVVKKAPKERPISYAAHVDSHIYSYYCELLNQAYEDHLAKVQWSPAILAFRTLGKSNINFAREAFLDIATRDSCCVIAIDIKGFFDNLDHAHLKSAWRTLLGTNQLSDDHYAVYRSLTKFSFVYRDQVYETLGLSKNNPKPGRKRICEPHEFRTKVRDGGLIKTNKDKKGIPQGSPISALLSNVYMMGFDEQIHTYVQTCGGAYYRYCDDVLLIVPLEKEAEAKALVEQRVNAIGLEIQASKTETCKFKRSAMGLRSDRPLQYLGFIFDGANIYLRSSSLARYRDRVKKGIWMAEQCMEKVNAKRISRGQLPRSMFLKKLYKRYSYLGRRNFISYGYRAARIMNAPSIKKQLKPHWNRLRKRISDAQGERH

SEQ ID NO: 453 - protein, 308 aa, Photobacterium leiognathi
MKILIKDWFKPRKYIHFDLPINSKKASKIVTDSEVVAKHAFYPLINYDIVINKITKNPITKNIMVLEPKPRPISYPAHIDSHIYSYYSKILNYKYEKMIKENGLSDSILAFRTLGKSNIDFSLNAFNEIKKLGECSAVALDITKFFDTLDHETLKLKWCNLLDVKRLPNDHYNIFKSITKYSKVKKEDLYKALGISLNNPNKKRRRICEPHDFRGIVRKYKLIKVHKDSFGIPQGTPLSAMLSNIYMFDFDLKMNSFITQFGGKYFRYCDDILFIIPTEYKNIVEQTASIEIENLKLELNKKKTEIRN

SEQ ID NO: 454 - protein, 426 aa, Zoogloea oryzae; identical to SEQ ID NO: 106

SEQ ID NO: 455 - protein, 429 aa, Janthinobacterium sp.; identical to SEQ ID NO: 107

SEQ ID NO: 456 - protein, 423 aa, Pandoraea iniqua; identical to SEQ ID NO: 108

SEQ ID NO: 457 - protein, 182 aa, Klebsiella pneumoniae
MNNDDYPWFRKRGYLHFDEPVSLKKAVKYVSSPEKIIKHSFLPFLSFEVKSFKIKKDKSTKQLSKTEKLRPIAYSSHLDSHIYAFYAEYLTGHYELLIQENNLHENILAFRSLNKSNIEFAKRAFDTITEMGECSAVALDLSGFFDNLDHQILKHQWCKVIGTEALPQDHFAIYKSITRYSK

SEQ ID NO: 458 - protein, 163 aa, Klebsiella pneumoniae
MNNDDYPWFRKRGYLHFDEPVSLKKAVKYVSSPEKIIKHSFLPFLSFEVKSFKIKKDKSTKQLSKTEKLRPIAYSSHLDSHIYAFYAEYLTGHYELLIQENNLHENILAFRSLNKSNIEFAKRAFDTITEMGECSAVALDLSGFFDNLDHQNFETPVVQSYWD

SEQ ID NO: 459 - protein, 424 aa, Aeromonas hydrophila
MNSENKWFRSRGYLHFDSPVKLRKACKIVKSPLNVAQHAFFPLIKYDIQSLKISIDKDGNVLKKIKTRPISYASHVDSHIYSYYAELLSDLYEKTLSESQLKDSVLAFRSLGKSNIDFANIAFEKIKSYGNCTAIAMDISGFFDNLDHEILKTMWYKLLQENSLPNDHFNIYRSLTKSSVVNRDMLYTALKVSKNNPNTAGLRLCDIKTFREKVRGLELIKTNLTGKGIPQGTSISALLSNIYMLDFDKKIKEIVTSISGAYYRYCDDMLFIVDSNKTSDLISQVTHNITELKIEINDKKTEIRTFHTHRGVQKCDKPLQYLGFIFDGERKLIRSAALARFSGRMKAGVRLAKKTHQKANLIEEKEGLAKTPLFKKKIYERYSHLSKRNFITYGHRAANIMGSHAIRKQLKPLWGRLIKEINEK

SEQ ID NO: 460 - protein, 424 aa, Aeromonas hydrophila
MNSENKWFRSRGYLHFDSPVKLRKACKIVKSPLNVAQHAFFPLIKYDIQSLKISIDKDGNVLKKIKTRPISYASHVDSHIYSYYAELLSDLYEKTLSESQLKDSVLAFRSLGKSNIDFANIAFEKIKSYGNCTAIAMDISGFFDNLDHEILKTMWYKLLQENSLPNDHFNIYRSLTKSSVVNRDMLYTALKVSKNNPNTAGLRLCDIKTFREKVRGLELIKTNLTGKGIPQGTSISALLSNIYMLDFDKKIKEIVTSISGEYYRYCDDMLFIVDSNKTSDLISQVTHNITELKIEINDKKTEIRTFHTHRGVQKCDKPLQYLGFIFDGERKLIRSAALARFSGRMKAGVRLAKKTHQKANLIEEKEGLAKTPLFKKKIYERYSHLSKRNFITYGHRAANIMGSHAIRKQLKPLWGRLIKEINEK

SEQ ID NO: 461 - protein, 247 aa, Aeromonas sp.
MNSENKWFRSRGYLHFDSPVKLRKACKIVKSPLNVAQHAFFPLIKYDIQSLKISIDKDGNVLKKIKTRPISYASHVDSHIYSYYAELLSDLYEKTLSESQLKDSVLAFRSLGKSNIDFANIAFEKIKSYGNCTAIAMDISGFFDNLDHEILKTMWYKLLQENSLPNDHFNIYRSLTKSSVVNRDMLYTALKVSKNNPNTAGLRLCDIKTFREKVRGLELIKTNLTGKGIPQGTSISALLSNIYMLNN

SEQ ID NO: 462 - protein, 424 aa, Aeromonas aquatica; identical to SEQ ID NO: 113

SEQ ID NO: 463 - protein, 427 aa, Pseudomonas sp.; identical to SEQ ID NO: 120

SEQ ID NO: 464 - protein, 429 aa, Pseudomonas aeruginosa
MPENWYKSRGYLHFDRPINQAAALEIVSSPKTVAKHAFYPFIRYVAQTQKVFFDKSIGKVVKKAPKERPISYAAHVDSHIYSYYCELLNQAYEDHLAKVQWSPAILAFRTLGKSNINFAREAFLDIATRDSCCVIAIDIKGFFDNLDHAHLKSAWRTLLGTNQLSDDHYAVYRSLTKFSFVYRDQVYETLGLSKNNPKPGRKRICEPHEFRTKVRDGGLIKTNKDKKGIPQGSPISALLSNVYMMGFDEQIHTYVQTCGGAYYRYCDDVLLIVPLEKEAEAKALVEQRVNAIGLEIQASKTETCKFKRSAMGLRSDRPLQYLGFIFDGANIYLRSSSLAHYRDRVKKGIWMAEQCMEKVNAKRISRGQLPRSMFLKKLYKRYSYLGRRNFISYGYRAARIMNAPSIKKQLKPHWNRLRKRISDAQGERH

SEQ ID NO: 465 - protein, 429 aa, Pseudomonas aeruginosa; identical to SEQ ID NO: 464

SEQ ID NO: 466 - protein, 429 aa, Pseudomonas sp.; identical to SEQ ID NO: 124

SEQ ID NO: 467 - protein, 394 aa, Stutzerimonas stutzeri; identical to SEQ ID NO: 126

SEQ ID NO: 468 - protein, 427 aa, Pseudomonas migulae; identical to SEQ ID NO: 128

SEQ ID NO: 469 - protein, 233 aa, Pseudomonas campi; identical to SEQ ID NO: 129

SEQ ID NO: 470 - protein, 436 aa, Litoribrevibacter albus
MPKNIPKWFKTRRYLHFDSPVRYSKAQSIVMSQKRVSMHAFYPLISYEIETVKISKDETGSIRKKPKIRPIKYAAHIDSHIYAYYTYQLSKSYETKITEYGLNESILAFRSLGKGNIEFANQAFEDIKKQMNCVAVALDVTGFFDNLDHLILKQAWANVIDCSYLPDDHFNVFKSLTEFSEVALDEVYCKLGISKHNSKKGRFKLCDAATFRNLIRGSGIIKTNSQSKGIPQGSPLSALLSNIYMLEFDKWAKEVINLCSGHYYRYCDDILFIVPEEVSKEIESRASLRIQDLRLSINPDKTEIRKFWTKGTTQFSNKPLQYLGFTFDGRSKLLRSAALARYSGKMKSGVRQAMKKRNKENLLRLEQGIPIQDIYRKKLYKRYSHLSNRNFITYGHRAAKIMGSSAIRKQLKPLWSRLQKEIEKANKTNTFPSIYS

SEQ ID NO: 471 - protein, 196 aa, Neisseria elongata
MPKVKKENGELKRDAKEREIAYASHKDSHIFSYYTHILNGKYENLIENKYHSINNSVLAFRKLGKSNIEFAKYAFDYILKYKNCSVIALDVSNFFGNIDHNILKEKWKKIISNDTLPPDHFAVFKAITQYSIIKKKLHLKNLVYLFTHLEAIVENKFAHLKSLENLGMNLTIHYLKVIKLFIPTKERGKVFHKDLQ

SEQ ID NO: 472 - protein, 392 aa, Neisseria flavescens
MPKVKKENGELKRGAKEREIAYASHKDSHIFSYYTHILNEKYENLIENKYSSINNSVLAFRKLGKSNIEFAKYAFDYILKHKNCSVIALDISNFFGNIDHNILKAKWKKIISNGTLPPDHFAVFKAITQYSIIKKEIAFKEFGISIHTPRSNSRKQICSPEEFRKFRDKFNDTLFKGNQVIYSNKGMGKGIPQGSPISALLSNIYMIDFDIIVQDIIQEKNGLYMRYCDDILCIIPSDELEIIRTFIKNEIKKLKLDINEKKTEIVNFKFDQEKNKITNDKKLQYLGFIIKDESITIRPAAFTKYSKKMKRGVSLAKQTQRKYNKIRELNGKEKKKIFKHKLFVTYSHLGKRNFVSYGKRAARIMQSKQIRKQLKPLFNRLKARIKDSDTLE

SEQ ID NO: 473 - protein, 181 aa, Klebsiella pneumoniae subsp. pneumoniae
MPQDHFAIYKSITRYSKVDKNRAYEILGISKNNPKYNRRKICTPVDFRNKIRKNGLIIVNNSQKGIPQGSPISALLSNIYMLDFDIEMRDYAQERGGHYYRYCDDMLFIVPTKYNKTLAGDVAQRIKHLKVELNTKKTEIRDFIYKDSTLVANMPLQYLGFIFDGVIYYYVHLLSQDIRNE

SEQ ID NO: 474 - protein, 430 aa, Janthinobacterium sp.; identical to SEQ ID NO: 135

SEQ ID NO: 475 - protein, 396 aa, Duganella sacchari; identical to SEQ ID NO: 137

SEQ ID NO: 476 - protein, 423 aa, Burkholderia sp.; identical to SEQ ID NO: 142

SEQ ID NO: 477 - protein, 423 aa, Burkholderia cepacia
MSEPVEWFKRRRYLHFDLPTSEPAAVAIAGNPSIVARHAFYPFIQFTVKSRKVKWDKLTKRLVTTEKERPVSYASHVDSHIYACYASILSQRYEDYLKEVGYQSSVLAFRKLGKSNIEFAKDAFDAIKEMGGADVIASDISDFFGSLNHKILKASWAKILKVNELPNDHYNVFKSLTRFTWVDKTNLYKALGISIYNPRGSGARICTPEIFRSVVRKLGLIQRNAADKGIPQGSPISALLSNIYMTDFDQALWTSIASMGGKYFRYCDDMLIIAPEGKGKEFMRLARELADLYALPLHPKKTEERFFTSSSGKLLADKPLQYLGFVFDGQQVSLRSASLARYSDRMRRGVRLARVTMHARNTLRVERGESPRPLYKGKLYRRYSYLGRRNFVSYAIRAANILDEKAIKRQVKPLWKRLRSQMK

SEQ ID NO: 478 - protein, 429 aa, Paraglaciecola sp.; identical to SEQ ID NO: 144

SEQ ID NO: 479 - protein, 421 aa, Idiomarina ramblicola; identical to SEQ ID NO: 146

SEQ ID NO: 480 - protein, 369 aa, Pseudomonas syringae; identical to SEQ ID NO: 148

SEQ ID NO: 481 - protein, 370 aa, Pseudomonas syringae
MSNAWYKSRRYLHFDRPVNEDAALKVVSDQRAVARHSFYPLIRYVAESQKVHFDKAAGRVVKKDPKKRQISYAAHLDSHIYSYYCEALSDLYERYLSTTEWSASVLAFRTLGKSNIEFAYEAFMDIASRTECCAVGIDIKGFFDNLSHTHLKSSWQKLIDRPSLPDDHFAVYKSLTKFSFVDREEVYSALGISKNNPKNGRQRICEPHQFRSAIRGAGLIETNSIGKGIPQGSPISALLSNIYMMDFDEKLYSYVETHGGSYFRYCDDILLIVPLAKEAEAIQFVDDEVAAIKLEVQKTKTEICRFKKTAKGCRSDRALQYLGFIFDGENIYLRSSSLARYQERVNRGLSIATLSMQKVNTARIAREGLK

SEQ ID NO: 482 - protein, 425 aa, Pseudomonas amygdali; identical to SEQ ID NO: 149

SEQ ID NO: 483 - protein, 337 aa, Aeromonas dhakensis
MSNVYEKALHELQLKESVLAFRSLGKSNIDFANTAFEKIKAHGDCTAIAMDISGFFDNLDHVILKSMWCKLLQENSLPSDHFNIYRSLTKSSTVNRDLLYAALKISRNNPKSTGARLCDIKTFRDKIRGLGLIKTNSTGKGIPQGTSISALLSNIYMLDFDKKIKDIVVSISGEYYRYCDDMLFIIDSDKTSELISIVTKSISELKIEINDKKTEVRNFHVYSGVQKCDKPLQYLGFIFDGERKLIRSAALARFSGRMKAGVRLAKKTHQKANLIEEKNGVAKTPLFKKKIYERYSHLSKRNFITYGHKAANIMGSNAIKKQLKPLWGRLLKEMNEQ

SEQ ID NO: 484 - protein, 337 aa, Aeromonas dhakensis; identical to SEQ ID NO: 483

SEQ ID NO: 485 - protein, 427 aa, Vibrio vulnificus
MSSNKPLWYRSRGYLHFDLPVSFKKAKNLVTNPDLVSKHAFFPLINYAVESKKISKNKDTRKIDVAVKERPIAYSSHMDSHIYAFYANLLSKKYEAKLKSAGLSESILAFRGLGKSNIDFAFEAFEQIKVMGECSAVALDFSKFFDTLDHDLLKQSWANLLGEKNLPSDHFNVFKSITKFSKVNKVELYKEFGISPNNPKNGRNRVCTAQEFRDVVRKKKLIETNKDPFGIPQGSPISALLSNIYMFEFDAEMKRYMDIHGGKYYRYCDDMLFIVPAPLRDKVAGYAQEQVKKLKVSINPKKTELRTFSSQGDILVADQMLQYLGFMFDGENVYIRSSSLARYSEKMKRGIRLAKKTMDKYNAVRAAKGLPEKALYKRKLYSRYTHLGGRNFVTYGLRAASTMHSKTIKRQLKPLWRRFHEELERET

SEQ ID NO: 486 - protein, 427 aa, Vibrio parahaemolyticus
MSSNKPLWYRSRGYLHFDLPVSFKKAKNLVTNPDLVSKHAFFPLINYAVESKKISKNKDTRKIDVAVKERPIAYSSHMDSHIYAFYANLLSNKYEAKLKSAGLTESILAFRGLGKSNIDFAFEAFEQIKIMGECSAVALDFSKFFDTLDHELLKQSWANLLGEKNLPSDHFNVFKSITKFSKVNKVELYKEFGISPNNPKNGRNRVCTAQEFRDVVRKKKLIKTNKDPFGIPQGSPISALLSNIYMFEFDAEMKRYMDIHGGKYYRYCDDMLFIVPAPLRDKVAGYAQEQVKKLKVSINPKKTELRTFSSQGDILVADQMLQYLGFMFDGENVYIRSSSLARYSEKMKRGIRLAKKTMDKYNAVRAAKGLPEKALYKRKLYSRYTHLGGRNFVTYGLRAASTMQSKTIKRQLKPLWRRFHEELERET

SEQ ID NO: 487 - protein, 427 aa, Vibrio parahaemolyticus; identical to SEQ ID NO: 486

SEQ ID NO: 488 - protein, 442 aa, Neisseria elongata subsp. glycolytica
MSTSNPSWYKCRGYLHFDSPINSRQAISLVTSPKKVVTHSFYPFLSCTLSMPKVKKENGELKRDAKEREIAYASHKDSHIFSYYTHILNGKYENLIENKYHSINNSVLAFRKLGKSNIEFAKYAFDYILKYKNCSVIALDVSNFFGNIDHNILKEKWKKIISNDTLPPDHFAVFKAITQYSIIKKEIAFKEFGISIHTPRSNSRKQICSPEEFRKFRDEFNDTLLKGNQVIYSNKGKGKGIPQGSPISALLSNIYMIDFDIIVQDIIQEKNGLYMRYCDDILCIIPSDKLEIIRTFIKNEIKKLKLDINEKKTEIVNFKFDQEKNKITNDKKLQYLGFILKNESITIRPAAFTKYSKKMKRGVSLAKQTQRKYNKIRELNGKEKKKIFKHKLFVTYSHLGKRNFVSYGKRAAWIMESKQIRKQLKPLFNRLKARIKDCDTLE

SEQ ID NO: 489 - protein, 442 aa, Neisseria elongata subsp. glycolytica; identical to SEQ ID NO: 488

SEQ ID NO: 490 - protein, 442 aa, Neisseria flavescens; identical to SEQ ID NO: 151

SEQ ID NO: 491 - protein, 436 aa, Wohlfahrtiimonas chitiniclastica
MTSQIPDWYTTRSYLHFDSPISKEKAIKIVTTPEIVAQHAFYPFIKFITKKRKITKENGKPIFGYKDRDISYASHIDSHIFAYYASILTQHYEKKLQLASLHNNILAFRKVDRKSNINFAHDAFTTIQNMAPCAVLALDFSKFFDTLDHHILKQAWADLLQVDKLPLDHYKVFRAITKFSTIDLYKIYKALGISQHTPRAHHRYCLGSAETLRKLKQQKLLISGKQRQIGIPQGSPISALLSNIYMLEFDLLMKKKVSELSGQYYRYCDDMLFIIPQNSISELESFAISTIKQFKVTINADKTEKRFFTIENGIVKSKDENQQYMPLQYLGFLFTGTNIYLRPASLHRYSEKMKGGVRLAKATMKRKNNLRRDHSEPKRDLYKRKLHRLYSYRGKRNFISYGYRAASIMNSKTIRKQLKPLWKKLQSEIQKANPNQ

SEQ ID NO: 492 - protein, 428 aa, Desulfurivibrio alkaliphilus
MVFMRSQDHPWYKSRGYIHFDLPIGVRQAEAIATSPKRVKRHSFYPFIAYEIKSKKVRKGEDGKSLAIKEKKRPVSYASHVDSHIYTYYTYMLNEAYEKFIKDIGVEENVMAFRKLGKSNIDFANDAFNKIIERQFCAAIAFDIEGFFDNLNHSILKESWSRVLGLKKLPDDHYNVFKSLTKFSKVYKDPLYEAFAISKNNPKKKNKRVCEPRDFRKVVRKNGLVEVNNTQKGIPQGSPISALLSNIYMVEFDQIVSSVMGEINGCYLRYCDDILCIVPLARKNEIIDRINKEIKKLNLNINTDKTKTSEYRVVKGQLTCDKPLQYLGFVFDGHHKLIRSAALARFSERMKSGVRLAKLTRIKYNRVRIRKGQPRQDVYKRKIYERYSHLGQRNFIRYGLRCAETMGSSAIKKQLKPFWARLQEEIEK

SEQ ID NO: 493 - protein, 428 aa, Alcanivorax sp.; identical to SEQ ID NO: 167

SEQ ID NO: 494 - protein, 452 aa, Collimonas arenae
MVNPGERSIDCRHLRSPGLLVHPEKVRLFKKKHPWFRRRGYRHFDNPIGFATARKIVTSPHRVETHSFYPLIDFNATSIKVKREASTNQLKKIPKIRPICYAAHIDSHIYSYYAYMLAKRYEQAVHENGLDTCVIAFRSLKKSNIEFAADVFDEIKRRDNCHVICLDIKGFFDNLDHETLKNSWANILGQEKLPGDHYAVFRSLTNHAKVGKTELYALLDISIHNPGGNSKRLCSVEDFREKVRKAKIIKRQTGTKGIPQGSPISALLSNIYMLAFDIVINSYVQKCGGRYFRYCDDMLLIVPAEEKNQALNLAEAEIKKLLLIIQSEKTEQRDFAVVAGKLQSSKPLQYLGFLFDGQRILLRSASLARYSDRMRRGIRLAKATMKKKNEVRTANGDAAKALFKRKIYKRYTCVGRRNFITYGYRAAQMMQSKSIKKQLRCLWLRVQKEILK

SEQ ID NO: 495 - protein, 425 aa, Yersinia ruckeri; identical to SEQ ID NO: 170

SEQ ID NO: 496 - protein, 425 aa, Yersinia pseudotuberculosis; identical to SEQ ID NO: 171

SEQ ID NO: 497 - protein, 425 aa, Yersinia pseudotuberculosis
MVQPEHPWFRTRGYLHFDKPISLKKTLRLVTDPSKVAKHSFLPFITFDVKSYKISQDKITKKITKDEKERKIAYSSHVDSHIYEYYAEILSGIYEEKLKLYGVSSNVIAFRALNKSNIEFANEAFNSIKNRKECGAVALDLSKFFDTLDHSQLKDAWCRLLGAEELPEDHYAVFKNITRYSAVYKNKLYEHLKISKNNPKFKRYSICSFGDFRNNVRESKLITKNKAGYGIPQGSPISALLSNIYMLNFDIDMRNYVNSVGGDYYRYCDDMLFIVPLDQIDKVAGIAEKELFKLKVTLNIKKTELRTFTRTSERITADKPLQYLGFLFDGHNIYLRSSSLSRYSDRMRRGVRLAKATMKSKNKTRVAKGMVKKSLFTEKIYARYAHVGKRNFLTYGYRAARIMESSTIRKQLKPLLQRLKNEIEK

SEQ ID NO: 498 - protein, 425 aa, Yersinia aleksiciae; identical to SEQ ID NO: 172

SEQ ID NO: 499 - protein, 404 aa, Pseudomonas aeruginosa
MVSSPKTVAKHAFYPFIRYVAQTQKVFFDKSIGKVVKKAPKERPISYAAHVDSHIYSYYCELLNQAYEDHLAKVQWSPAILAFRTLGKSNINFAREAFLDIATRDSCCVIAIDIKGFFDNLDHAHLKSAWRTLLGTNQLSDDHYAVYRSLTKFSFVYRDQVYETLGLSKNNPKPGRKRICEPHEFRTKVRDGGLIKTNKDKKGIPQGSPISALLSNVYMMGFDEQIHTYVQTCGGAYYRYCDDVLLIVPLEKEAEAKALVEQRVNAIGLEIQASKTETCKFKRSAMGLRSDRPLQYLGFIFDGANIYLRSSSLARYRDRVKKGIWMAEQCMEKVNAKRISRGQLPRSMFLKKLYKRYSYLGRRNFISYGYRAARIMNAPSIKKQLKPHWNRLRKRISDAQGERH

SEQ ID NO: 500 - protein, 404 aa, Pseudomonas aeruginosa; identical to SEQ ID NO: 499

SEQ ID NO: 501 - protein, 428 aa, Klebsiella sp.; identical to SEQ ID NO: 174

SEQ ID NO: 502 - protein, 195 aa, Aeromonas media; identical to SEQ ID NO: 175

SEQ ID NO: 503 - protein, 427 aa, Vibrio harveyi
MSAKSPTWYRSRGYLHFDLPISSVKAKRLVTNPELVAKHAFFPLINYSVESKKISKDKASSRIDVTYKERPIAYSSHVDSHIYAYYAELLSVKYESKLKELELSECVLAFRGLGKSNIDFAHEAFEQIKNMGECSVVALDFSKFFDTLDHELLKKSWAAILDTNKLPNDHFNVFKSITKFSKVNKVDLYNEFSISNNNPKKGRNRVCSSKEFRDVVRAKKLIKTNQDSFGIPQGSPISALLSNIYMLEFDAEMNRYVKMYGGKYYRYCDDMLFIVPTGQKKKVAGYAQKKVKGLKVSINPKKTELRTFTKQGNILVADQMLQYLGFMFDGENAYIRSSSLARYSEKMKRGIRLAKKTMVKYNAIRQSKGLDEQPLYKRKLYSRYTHLGGRNFITYGLRAADTMGSKTIKRQLKPLWRRFNEELKKET

SEQ ID NO: 504 - protein, 293 aa, Vibrio harveyi
MSAKSPTWYRSRGYLHFDLPISSVKAKRLVTNPELVAKHAFFPLINYSVESKKISKDKASSRIDVTYKERPIAYSSHVDSHIYAYYAELLSVKYESKLKELELSECVLAFRGLGKSNIDFAHEAFEQIKNMGECSVVALDFSKFFDTLDHELLKKSWAAILDTNKLPNDHFNVFKSITKFSKVNKVDLYNEFSISNNNPKKGRNRVCSSKEFRDVVRAKKLIKTNQDSFGIPQGSPISALLSNIYMLEFDAEMNRYVKMYGGKYYRYCDDMLFIVPTGQKRKLQVMLRRKLRD

SEQ ID NO: 505 - protein, 204 aa, Alloalcanivorax xenomutans
MYVNDRSVGIPQGSPISALLSNIYMINFDCAIAEVAKEAGAYYCRYCDDILVVCDTENVVDFEDLIRRELGKLKLDINEQKTDKARYRVSKGKVYCDRPIQYLGFLFDGESVFLRSASLARYSERMRRGVHLAKKTKRKYNKMRVKRGEPIRRLYKKKLYARYSHLGRRNFVRYGLRAADIMESKEIRQQLKPLWRRLKEEMER

SEQ ID NO: 506 - protein, 427 aa, Nitratidesulfovibrio vulgaris
MKKEKIDGWYKSGRNYLHFDEKVSFEKASRIVKNPRKVASWNFFPFLQTTVKTSKITRNDEGEIVPKNKSRPISYAAHTDSHIYSYYATLLQPIYEKFIEKHGLGTNITGFRKLDGECNIDFAHRAFNAIRSMTPCIALSFDVKSFFDEIDHSILKQAWCTILEKTLLPEDHFAIFKSLTTYSYVDRDDAFNAFGITKSSKKNGIRRICNPLEFRSILRPAGLIKRNKNSYGIPQGSPISGLLSNIYLFEFDKAISYFASDTKSHYYRYCDDIIIICNEEHEELFKNLVSDELKKLNLRTNEKNVIRKFFMGCDGPECDKPIQYLGFVFDGKRAVIRSASHSRFLKRMRKAVSLAKQTKRKRDKIRTSKGLETTSLHKKKLYTKYSYLGNRNYISYAHRAAKIMDEDAIKKQVKPLWKRLRQEIESD

SEQ ID NO: 507 - protein, 125 aa, Vibrio paracholerae
MSSNKPLWYRSRGYLHFDLPVSINKAKNLVTNPDLVSKHAFFPLISYTVESKKISKNKDTRKIDVAVKQRPIAYSSHMDSHIYAFYANLLSKKYEAKLKSAGLAESILAFRGLGKSNIDFAFEAF

SEQ ID NO: 508 - protein, 125 aa, Vibrio cholerae; identical to SEQ ID NO: 507

SEQ ID NO: 509 - protein, 429 aa, Pseudomonas aeruginosa
MPENWYKSRGYLHFDRPINQAAALEIVSSPKTVAKHAFYPFIRYVAQTQKVFFDKSIGKVVKKAPKERPISYAAHVDSHIYSYYCELLNQAYEDHLAKVQWSPAILAFRTLGKSNINFAREAFLDIATRDSCCVIAIDIKGFFDNLDHAHLKSAWRTLLGTNQLSDDHYAVYRSLTKFSFVYRDQVYETLGLSKNNPKPGRKRICEPHEFRTKVRDGGLIKTNKDKKGIPQGSPISALLSNVYMMGFDEQIHTYVQTCGGAYYRYCDDVLLIVPLEKEAEAKALVEQRVNAIGLEIQASKTETCKFKRSAMGLRSDRPLQYLGFIFDGANIYLRSSSLARYRDRVKKGIWMAEQCMEKVNAKRISRGQLPRSMFLKKLYKRYSYLGRRNFISYGYRAARIMNAPSIKKQLKPHWNRLRKRISDAQGERH

SEQ ID NO: 510 - protein, 427 aa, Pseudomonas sp.; identical to SEQ ID NO: 186

SEQ ID NO: 511 - protein, 427 aa, Pseudomonas sp.; identical to SEQ ID NO: 187

SEQ ID NO: 512 - protein, 429 aa, Pseudomonas aeruginosa
MPENWYKSRGYLHFDRPINQAAALEIVSSPKTVAKHAFYPFIRYVAQTQKVFFDKSIGKVVKKAPKERPISYAAHVDSHIYSYYCELLNQAYEDHLAKVQWSPAILAFRTLGKSNINFAREAFLDIATRDSCCVIAIDIKGFFDNLDHAHLKSAWRTLLGTNQLSDDHYAVYRSLTKFSFVYRDQVYETLGLSKNNPKPGRKRICEPDEFRTKVRDGGLIKTNKDKKGIPQGSPISALLSNVYMMGFDEQIHTYVQTCGGAYYRYCDDVLLIVPLEKEAEAKALVEQRVNAIGLEIQASKTETCKFKRSAMGLRSDRPLQYLGFIFDGANIYLRSSSLARYRDRVKKGIWMAEQCMEKVNAKRISRGQLPRSMFLKKLYKRYSYLGRRNFISYGYRAARIMNAPSIKKQLKPHWNRLRKRISDAQGERH

SEQ ID NO: 513 - protein, 429 aa, Pseudomonas aeruginosa; identical to SEQ ID NO: 512

SEQ ID NO: 514 - protein, 425 aa, Agarivorans gilvus; identical to SEQ ID NO: 193

SEQ ID NO: 515 - protein, 429 aa, Pseudomonas aeruginosa
MPENWYKSRGYLHFDRPINQAAALEIVSSPKTVAKHAFYPFIRYVAQTQKVFFDKSIGKVVKKAPKERPISYAAHVDSHIYSYYCELLNQAYEDHLAKVQWSPAILAFRTLGKSNINFACEAFLDIATRDSCCVIAIDIKGFFDNLDHAHLKSAWRTLLGTNQLSDDHYAVYRSLTKFSFVYRDQVYETLGLSKNNPKPGRKRICEPHEFRTKVRDGGLIKTNKDKKGIPQGSPISALLSNVYMMGFDEQIHTYVQTCGGAYYRYCDDVLLIVPLEKEAEAKALVEQRVNAIGLEIQASKTETCKFKRSAMGLRSDRPLQYLGFIFDGANIYLRSSSLARYRDRVKKGIWMAEQCMEKVNAKRISRGQLPRSMFLKKLYKRYSYLGRRNFISYGYRAARIMNAPSIKKQLKPHWNRLRKRISDAQGERH

SEQ ID NO: 516 - protein, 426 aa, Marinomonas sp.; identical to SEQ ID NO: 195

SEQ ID NO: 517 - protein, 427 aa, Aliivibrio fischeri; identical to SEQ ID NO: 198

SEQ ID NO: 518 - protein, 427 aa, Pseudomonas kuykendallii
MPENWYKSRGYLHFDRPINQAAALEIVSSPKTVAKHAFYPFIRYVAQTQKVFFDKSIGKVVKKDPKQRPISYAAHVDSHIYSYYCELLNRAYEDHLAKVQWSSAILAFRALGKSNIDFARDAFLDIATRDSCCVIAIDIKGFFDNLDHAYLKNAWQALLGSSQLPDDHYAVYRSLTKFSFVYRDQVYEALGLSKSNPKQGRKRICEPHEFRAKVREGGLIETNKDKKGIPQGSPISAMLSNVYMMGFDKQIHAHVESCGGAYYRYCDDVLLIVPLEKEAETRALVDLRVNEIGLEIQAAKTETCKFTRSAKGLRSDRPLQYLGFIFDGANIYLRSSSLARYQDRVHRGIWLAEKCMGKVNAKRISRGQLPRSMFLKKLYKRYSYLGRRNFISYGYRAARIMNAPSIKKQLKPHWNRLRERISDAQGE

SEQ ID NO: 519 - protein, 429 aa, Pseudomonas aeruginosa
MPENWYKSRGYLHFDRPINQAAALEIVSSPKTVAKHAFYPFIRYVAQTQKVFFDKSIGKAVKKAPKERPISYAAHVDSHIYSYYCELLNQAYEDHLAKVQWSPAILAFRTLGKSNINFAREAFLDIATRDSCCVIAIDIKGFFDNLDHAHLKSAWRTLLGTNQLSDDHYAVYRSLTKFSFVYRDQVYETLGLSKNNPKPGRKRICEPHEFRTKVRDGGLIKTNKDKKGIPQGSPISALLSNVYMMGFDEQIHTYVQTCGGAYYRYCDDVLLIVPLEKEAEAKALVEQRVNAIGLEIQASKTETCKFKRSAMGLRSDRPLQYLGFIFDGANIYLRSSSLARYRDRVKKGIWMAEQCMEKVNAKRISRGQLPRSMFLKKLYKRYSYLGRRNFISYGYRAARIMNAPSIKKQLKPHWNRLRKRISDAQGERH

SEQ ID NO: 520 - protein, 427 aa, Pseudomonas sp.; identical to SEQ ID NO: 202

SEQ ID NO: 521 - protein, 427 aa, Vibrio sp.; identical to SEQ ID NO: 204

SEQ ID NO: 522 - protein, 427 aa, Vibrio splendidus; identical to SEQ ID NO: 205

SEQ ID NO: 523 - protein, 427 aa, Stutzerimonas kunmingensis; identical to SEQ ID NO: 206

SEQ ID NO: 524 - protein, 427 aa, Vibrio splendidus; identical to SEQ ID NO: 207

SEQ ID NO: 525 - protein, 427 aa, Vibrio sp.
MRIVPKEWFRPRTYLHFDLPISLKKASIIVTDPILVAKHAFYPLIHYTIEANKIGKDPISKKVVPLPTKSRPISYPAHVDSHIYAYYSKILNQRYEEKLKKDGLSDSILAFRSLGKSNIDFALDAFNTIKTSGECCAVALDISGFFDSLDHDILKREWCNLLQVQRLPKDHFNVFKSITKHSFVKKDELYKSLGISLNYHNYSKRRVCSPQEFREKVRGGKLIKPHKLSFGIPQGTPLSAMLSNVYMFDFDVKMKEFVNVHNGKYFRYCDDMLFVVPIEYKSKVESFAMETIQSLQLSVNPKKTEIRIFRKDGEKLKADKHLQYLGFMFNGEDIFIRSSSLARYSERMRRGVRLAKKTMIKYNNIRHHNGQSERPLFKRKLYSRYTHLGKRNFITYGIRAANKMESHSIRRQLKPLFKRFNDEINKD

SEQ ID NO: 526 - protein, 427 aa, Vibrio sp.; identical to SEQ ID NO: 525

SEQ ID NO: 527 - protein, 428 aa, Shewanella algae; identical to SEQ ID NO: 208

SEQ ID NO: 528 - protein, 427 aa, Vibrio crassostreae; identical to SEQ ID NO: 214

SEQ ID NO: 529 - protein, 429 aa, Pseudomonas aeruginosa
MPENWYKSRGYLHFDRPINQAAALEIVSSPKTVAKHAFYPFIRYVAQTQKVFFDKSIGKVVKKAPKERPISYAAHVDSHIYSYYCELLNQAYEDHLAKVQWSPAILAFRTLGKSNINFAREAFLDIATRDSCCVIAIDIKGFFDNLDHAHLKSAWRTLLGTNQLSDDHYAVYRSLTKFSFVYRDQVYETLGLSKNNPKPGRKRICEPHEFRTKVRDGGLINTNKDKKGIPQGSPISALLSNVYMMGFDEQIHTYVQTCGGAYYRYCDDVLLIVPLEKEAEAKALVEQRVNAIGLEIQASKTETCKFKRSAMGLRSDRPLQYLGFIFDGANIYLRSSSLARYRDRVKKGIWMAEQCMEKVNAKRISRGQLPRSMFLKKLYKRYSYLGRRNFISYGYRAARIMNAPSIKKQLKPHWNRLRKRISDAQGERH

SEQ ID NO: 530 - protein, 429 aa, Stutzerimonas stutzeri; identical to SEQ ID NO: 215

SEQ ID NO: 531 - protein, 426 aa, Colwellia sp.; identical to SEQ ID NO: 216

SEQ ID NO: 532 - protein, 429 aa, Pseudomonas aeruginosa
MPENWYKSRGYLHFDRPINQAAALEIVSSPKTVAKHAFYPFIRYVAQTQKVFFDKSIGKVVKKAPKERPISYAAHVDSHIYSYYCELLNQAYEDHLAKVQWPPAILAFRTLGKSNINFAREAFLDIATRDSCCVIAIDIKGFFDNLDHAHLKSAWRTLLGTNQLSDDHYAVYRSLTKFSFVYRDQVYETLGLSKNNPKPGRKRICEPHEFRTKVRDGGLIKTNKDKKGIPQGSPISALLSNVYMMGFDEQIHTYVQTCGGAYYRYCDDVLLIVPLEKEAEAKALVEQRVNAIGLEIQASKTETCKFKRSAMGLRSDRPLQYLGFIFDGANIYLRSSSLARYRDRVKKGIWMAEQCMEKVNAKRISRGQLPRSMFLKKLYKRYSYLGRRNFISYGYRAARIMNAPSIKKQLKPHWNRLRKRISDAQGERH

SEQ ID NO: 533 - protein, 429 aa, Pseudomonas aeruginosa; identical to SEQ ID NO: 532

SEQ ID NO: 534 - protein, 429 aa, Pseudomonas aeruginosa
MPENWYKSRGYLHFDRPINQAAALEIVSSPKTVAKHAFYPFIRYVAQTQKVFFDKSIGKVVKKAPKERPISYAAHVDSHIYSYYCELLNQAYEDHLAKVQWSPAILAFRTLGKSNINFAREAFLDIATRDSCCVIAIDIKGFFDNLDHAHLKSAWRTLLGTNQLSDDHYAVYRSLTKFSFVYRDQVYETLGPSKNNPKPGRKRICEPHEFRTKVRDGGLIKTNKDKKGIPQGSPISALLSNVYMMGFDEQIHTYVQTCGGAYYRYCDDVLLIVPLEKEAEAKALVEQRVNAIGLEIQASKTETCKFKRSAMGLRSDRPLQYLGFIFDGANIYLRSSSLARYRDRVKKGIWMAEQCMEKVNAKRISRGQLPRSMFLKKLYKRYSYLGRRNFISYGYRAARIMNAPSIKKQLKPHWNRLRKRISDAQGERH

SEQ ID NO: 535 - protein, 429 aa, Pseudomonas aeruginosa; identical to SEQ ID NO: 534

SEQ ID NO: 536 - protein, 429 aa, Pseudomonas aeruginosa
MPENWYKSRGYLHFDRPINQAAALEIVSSPKTVAKHAFYPFIRYVAQTQKVFFDKSIGKVVKKAPKERPISYAAHVDSHIYSYYCELLNQAYEDHLAKVQWSPAILAFRTLGKSNINFFREAFLDIATRDSCCVIAIDIKGFFDNLDHAHLKSAWRTLLGTNQLSDDHYAVYRSLTKFSFVYRDQVYETLGLSKNNPKPGRKRICEPHEFRTKVRDGGLIKTNKDKKGIPQGSPISALLSNVYMMGFDEQIHTYVQTCGGAYYRYCDDVLLIVPLEKEAEAKALVEQRVNAIGLEIQASKTETCKFKRSAMGLRSDRPLQYLGFIFDGANIYLRSSSLARYRDRVKKGIWMAEQCMEKVNAKRISRGQLPRSMFLKKLYKRYSYLGRRNFISYGYRAARIMNAPSIKKQLKPHWNRLRKRISDAQGERH

SEQ ID NO: 537 - protein, 429 aa, Pseudomonas aeruginosa; identical to SEQ ID NO: 536

SEQ ID NO: 538 - protein, 337 aa, Pseudomonas aeruginosa
MPENWYKSRGYLHFDRPINQAAALEIVSSPKTVAKHAFYPFIRYVAQTQKVFFDKSIGKVVKKAPKERPISYAAHVDSHIYSYYCELLNQAYEDHLAKVQWSPAILAFRTLGKSNINFAREAFLDIATRDSCCVIAIDIKGFFDNLDHAHLKSAWRTLLGTNQLSDDHYAVYRSLTKFSFVYRDQVYETLGLSKNNPKPGRKRICEPHEFRTKVRDGGLIKTNKDKKGIPQGSPISALLSNVYMMGFDEQIHTYVQTCGGAYYRYCDDVLLIVPLEKEAEAKALVEQRVNAIGLEIQASKTETCKFKRSAMGLRSDRPLQYLGFIFDGANIYLRSSS

SEQ ID NO: 539 - protein, 426 aa, Pseudoalteromonas sp.; identical to SEQ ID NO: 218

SEQ ID NO: 540 - protein, 426 aa, Pseudoalteromonas aurantia; identical to SEQ ID NO: 219

SEQ ID NO: 541 - protein, 426 aa, Pseudoalteromonas sp.
MDDNHPCWYRRRGYLHFDLPIGTKKAISLTSNPSFVKKHSFYPLINYEVSSKKINKDKLSGKLLAKNKMRPIAYSSHVDSHIYAFYAEKLSELYEGTLKGNGLDKSVLAFRNLGKSNIDFAYEAFLKIKEMGECSAVALDFSKFFDTLDHNLLKKSWCKLLGQEKLPPDHFNVFKSITKFSTVDKLELYKLFSISKNKPRNQHKRICSSEDFRTKVRAEGLIKPNLCGYGIPQGSPISALLSNIYMLDFDLEMKKYADIHGGYYFRYCDDMLFIMPKRLKNKVAGFAQKHISKLKVRINPDKTEIRQFNKVGNILKADNTLQYLGFIFDGENIYLRSSSLARYSEKMRRGVSLAKQTMRKYNDIRAMKGADEKALYKKKLYSRYTHLGGRNFITYGLRAANKMESNTIKKQLKPLWRRFHEELDKD

SEQ ID NO: 542 - protein, 426 aa, Pseudoalteromonas sp.; identical to SEQ ID NO: 541

SEQ ID NO: 543 - protein, 426 aa, Pseudoalteromonas sp.; identical to SEQ ID NO: 227

SEQ ID NO: 544 - protein, 427 aa, Pseudomonas vanderleydeniana; identical to SEQ ID NO: 228

SEQ ID NO: 545 - protein, 426 aa, Pseudoalteromonas sp.; identical to SEQ ID NO: 230

SEQ ID NO: 546 - protein, 109 aa, Shewanella algae
MSCHQSEFSFKACLFPSDKLRRRIKKISKNRTTRKINVALKERPVPILRTLIVTSMHFYADLLSEKYENKLKSAGLSECVLAFRGLRKSNIDFAHEAFQQIKAMGSVVL

SEQ ID NO: 547 - protein, 427 aa, Stutzerimonas stutzeri
MPENWYKSRGYLHFDRPINQAAALEIVSSPKAVAKHAFYPFIRYVAQTQKVFFDKSIGKVVKKDPKQRPISYAAHVDSHIYSYYCDLLNQAYEGHLAKVRWASAILAFRALGKSNIDFARDAFLDIAARKSCCVIAIDIKGFFDNLDHTHLKNAWQAILDTSHLPDDHYAVFRSLTKYSFVYRDQVYEALGLSKNNPKQGRKRICEPHEFRAKVRDGGLIETNRDKKGIPQGSPISALLSNVYMMGFDEQIHAYVQSYGGSYYRYCDDVLLIVPLEKEAEAKALVDLRVNEIGLEIQTAKTETCKFTRSVKGLRSDRPLQYLGFIFDGANIYLRSSSLARYQDRVNRGIWLAGKCMDKVNAKRIARGQLPRSMFLKKLYKRYSYLGRRNFISYGYRAARAMNAPSIKKQLKPHWNRLRERISYAQGE

SEQ ID NO: 548 - protein, 266 aa, Pseudomonas aeruginosa
MSDDHYAVYRSLTKFSFVYRDQVYETLGLSKNNPKPGRKRICEPHEFRTKVRDGGLIKTNKDKKGIPQGSPISALLSNVYMMGFDEQIHTYVQTCGGAYYRYCDDVLLIVPLEKEAEAKALVEQRVNAIGLEIQASKTETCKFKRSAMGLRSDRPLQYLGFIFDGANIYLRSSSLARYRDRVKKGIWMAEQCMEKVNAKRISRGQLPRSMFLKKLYKRYSYLGRRNFISYGYRAARIMNAPSIKKQLKPHWNRLRKRISDAQGERH

SEQ ID NO: 549 - protein, 266 aa, Pseudomonas aeruginosa; identical to SEQ ID NO: 548

SEQ ID NO: 550 - protein, 424 aa, Pantoea ananatis; identical to SEQ ID NO: 240

SEQ ID NO: 551 - protein, 445 aa, Klebsiella pneumoniae; identical to SEQ ID NO: 241

SEQ ID NO: 552 - protein, 354 aa, Escherichia coli
MVYREHSWFRKRGYLHFDKPISEEHALNIVTDPYAVATHSFLPFITFTSTTFKVQKDKGTNAINKTIKERPIAYSSHVDSHIYSYYASILNELYEEELKKNNITDNVLAFRALNKSNIEFAYDAFQEIKKRGNCSAVALDLSKFFDTLDHSFLKKSWCQLLTAEKLPEDHYAVFKAITKFSKVDKNEVYELMGLPKNNAKHTKKTRKQICSFEDFRNKVRQSNLIIPNKANFGIPQGSPISALLSNIYMLNFDTEMKQYVSSLGGAYFRYCDDMLFIVPTHEKNNVAGEAEKRLFKLKVSLNIKKTEIRDFFVTPNKIKCDKPLQYLGFIFDGHNIFLRSSSLSRYSDRMKRGV

SEQ ID NO: 553 - protein, 427 aa, Vibrio crassostreae
MRIVPKEWFRPRTYLHFDLPISLKKASLIVYDPNLVAKHAFYPLIHYTIEANKIGKDPISKKVVSLPTKSRPISYPAHVDSHIYAYYSKVLNQSYEAKLKKEGLSDSILAFRSLGKSNIDFALDAFKAIKKSGECCAVALDISGFFDSLDHEILKREWCDLLQVKRLPKDHFNVFKSITNHSFVKKDELYKSLGISLNYHNHSKRRVCNPQDFREKVRGGKLINPHKLSFGIPQGTPLSAMLSNIYMFDFDMKMKQFVDIHDGQYFRYCDDMLFIVPIKFRSKVENFAMETIQSLQLSVNPKKTEIRTFRRDGEKLKADKHLQYLGFMFNGEDIFIRSSSLARYSERMRRGVRLAKKTMIKYNTIRHGNGQPERALFKRKLYSRYTHLGKRNFITYGIRAANKMESYSIRRQLKPLFKRFNDEINKD

SEQ ID NO: 554 - protein, 443 aa, Rheinheimera oceanensis; identical to SEQ ID NO: 243

SEQ ID NO: 555 - protein, 316 aa, Klebsiella variicola
MTAVRNRPGFTIIENPLMVYREHSWFRKRGYLHFDKPISEEHALNIVTDPYAVATHSFLPFITFTSTTFKVQKDKGTNAINKTIKERPIAYSSHVDSHIYSYYASILNELYEEELKKNNITDNVLAFRALNKSNIEFAYDAFQEIKKRGNCSAVALDLSKFFDTLDHSFLKKSWCQLLTAEKLPEDHYAVFKAITKFSKVDKNEVYELMGLPKNNAKHTKKTRKQICSFEDFRNKVRQSNLIIPNKANFGIPQGSPISALLSNIYMLNFDTEMKQYVSSLGGAYFRYCDDMLFIVPTHEKNNVAGEAEKRLFKLKV

SEQ ID NO: 556 - protein, 433 aa, Vibrio parahaemolyticus
MSAPLWYTKRNYLHFDVPVSGTKAEKIVTSTTSVARHAFFPFISYSFQLTKLDRDTSTGKLYRKPKPREVAYSSHIDSHIYAYYANQLSNLYEQKVEKSGLHESVLAFRKLDGKSNIHFADDAFNYIRKMKECSVIALDFSKFFNTLDHRILKEEWSKLLQVKHLPKDHYNVFRSLTKFSTVERDELFKTFGVSQYNQKANGRNRVCTPLEFREKVRGSGLITPNPNGAMGIPQGSPISALLSNIYMFSFDKHMKNYVDSIGGKYFRYCDDMLFIVPSEYRDTVEKLANSKITALKVQINSDKTEIRDFKFHNGQLCSFDEFGKQKPLQYLGFLFDGHSIFLRSTALARYSEKMKGGVKLAKKTMEKENRIRKSKGEPEQNQLYKRKLHRLYSYRGRRNFLSYGYRAAKIMNSKSIKRQLKPLWQRLQDEISK

SEQ ID NO: 557 - protein, 433 aa, Vibrio parahaemolyticus; identical to SEQ ID NO: 556

SEQ ID NO: 558 - protein, 152 aa, Klebsiella michiganensis
MVYREHSWFRKRGYLHFDKPISEEHALNIVTDPYAVATHSFLPFITFTSTTFKVQKDKGTNAINKTIKERPIAYSSHVDSHIYSYYASILNELYEEELKKNNITDNVLAFRALNKSNIEFAYDAFQEIKKEEIVVLSPWIYQNFLTLLIIRF

SEQ ID NO: 559 - protein, 433 aa, Vibrio parahaemolyticus
MSAPLWYTKRNYLHFDVPVSGTKAEKIVTSTTSVARHAFFPFISYSFQLTKLDRDTSTGKLYRKPKPREVAYSSHIDSHIYAYYANQLSNLYEQKVEKAGLHESVLAFRKLDGKSNIHFADDAFNYIRKMKECSVIALDFSKFFNTLDHRILKEEWSKLLQVKHLPKDHYNVFRSLTKFSTVERDELFKTFGISQYNQKANGRNRVCTPLEFREKVRGSGLINPNPNGAMGIPQGSPISALLSNIYMFSFDKHMKNYVDSIGGKYFRYCDDMLFIVPSEYRDTVEKLANSKIAALKVQINSDKTEIRDFKFHNGQLCSFDEFGKQKPLQYLGFLFDGHSIFLRSTALARYSEKMKGGVKLAKKTMEKENRIRKSKGEPEQNQLYKRKLHRLYSYRGRRNFLSYGYRAAKIMNSKSIKRQLKPLWQRLQDEISK

SEQ ID NO: 560 - protein, 433 aa, Vibrio parahaemolyticus
MSAPLWYTKRNYLHFDVPVSGTKAEKIVTSTTSVARHAFFPFISYSFQLTKLDRDTSTGKLYRKPKPREVAYSSHIDSHIYAYYANQLSNLYEQKVEKAGLHESVLAFRKLDGKSNIHFADDAFNYIRKMKECSVIALDFSKFFNTLDHRILKEEWSKLLQVKHLPKDHYNVFRSLTKFSTVERDELFKTFDISQYNQKANGRNRVCTPLEFREKVRGSGLINPNPNGAMGIPQGSPISALLSNIYMFSFDKHMKNYVDSIGGKYFRYCDDMLFIVPSEYRDTVEKLANSKIAALKVQINSDKTEIRDFKFHNGQLCSFDEFGKQKPLQYLGFLFDGHSIFLRSTALARYSEKMKGGVKLAKKTMEKENRIRKSKGEPEQNQLYKRKLHRLYSYRGRRNFLSYGYRAAKIMNSKSIKRQLKPLWQRLQDEISK

SEQ ID NO: 561 - protein, 433 aa, Vibrio parahaemolyticus; identical to SEQ ID NO: 560

SEQ ID NO: 562 - protein, 433 aa, Vibrio parahaemolyticus
MSVPLWYTKRNYLHFDVPVSGTKAEKIVTSTTSVARHAFFPFISYSFQLTKLDRDRSTGKLYRKPKPRGVAYSSHIDSHIYAYYASQLSSLYEHKVEKFGLHESVLAFRKLDGKSNIHFADDAFNYIRENEECSVIALDFSKFFDTLDHKILKNEWSKLLQVNSLPKDHYNVFRSLTKFSTVDRDELFKVFEISQYNPKANRRKRVCTPLEFREKVRGSGLIKPNPNGAMGIPQGSPISALLSNIYMFSFDKHMKNYVDSIGGKYFRYCDDMLFIVPSEYRDTVEKLANSKIAALKVQINSDKTEIRDFKFHNGQLCSFDEFGKQKPLQYLGFLFDGHSIFLRSTALARYSEKMKGGVKLAKKTMEKENRIRKSKGEPEQDQLYKRKLHRLYSYRGRRNFLSYGYRAAKIMNSKNIKRQLKPLWQRLQDEISK

SEQ ID NO: 563 - protein, 429 aa, Enterobacter roggenkampii; identical to SEQ ID NO: 247

SEQ ID NO: 564 - protein, 433 aa, Vibrio antiquarius
MSAPLWYTKRNYLHFDVPVSGTKAEKIVTSTTSVARHAFFPFISYSFQLTKLDRDTSTGKLYRKPKPREVAYSSHIDSHIYAYYANQLSNLYEQKVEKSGLHESVLAFRKLDGKSNIHFADDAFNYIRKMKECSVIALDFSKFFNTLDHRILKEEWSKLLQVKHLPKDHYNVFRSLTKFSTVERGELFKTFGISQYNQKANGRNRVCTPLEFREKVRGSGLINPNPNGAMGIPQGSPISALLSNIYMFSFDKHMKNYVDSIGGKYFRYCDDMLFIVPSEYRDTVEKLANSKITALKVQINSDKTEIRDFKFHNGQLCSFDELGKQKPLQYLGFLFDGHSIFLRSTALARYSEKMKGGVKLAKKTMEKENRIRKSKGEPEQNQLYKRKLHRLYSYRGRRNFLSYGYRAAKIMNSKSIKRQLKPLWQRLQDEISK

SEQ ID NO: 565 - protein, 433 aa, Vibrio alginolyticus
MSAPLWYTKRNYLHFDVPVSGTKAEKIVTSTTSVARHAFFPFISYSFQLTKLDRDTSTGKLYRKPKPREVAYSSHIDSHIYAYYANQLSNLYEQKVEKSGLHESVLAFRKLDGKSNIHFADDAFNYIRKMKECSVIALDFSKFFNTLDHRILKEEWSKLLQVKHLPKDHYNVFRSLTKFSTVERGELFKTFGISQYNQKANGRNRVCTPLEFREKVRGSGLINPNPNGAMGIPQGSPISALLSNIYMFSFDKHMKNYVDSIGGKYFRYCDDMLFIVPSEYRDTVEKLANSKITALKVQINSDKTEIRDFKFHNGQLCSFDEFGKQKPLQYLGFLFDGHSIFLRSTALARYSEKMKGGVKLAKKTMEKENRIRKSKGEPEQNQLYKRKLHRLYSYRGRRNFLSYGYRAAKIMNSKSIKRQLKPLWQRLQDEISK

SEQ ID NO: 566 - protein, 433 aa, Vibrio parahaemolyticus
MSVPLWYTKRNYLHFDVPVSGTKAEKIVTSTTSVARHAFFPFISYSFQLTKLDRDRSTGKLYRKPKPRGVAYSSHIDSHIYAYYASQLSSLYEHKVEKFGLHESVLAFRKLDGKSNIHFADDAFNYIRENEECSVIALDFSKFFDTLDHKILKDEWSKLLQVNSLPKDHYNVFRSLTKFSTVDRDELFKVFEISQYNPKANRRKRVCTPLEFREKVRGSGLIKPNPNGAMGIPQGSPISALLSNIYMFSFDKHMKNYVDSIGGKYFRYCDDMLFIVPSEYRDTVEKLANSKIAALKVQINSDKTEIRDFKFHNGQLCSFDEFGKQKPLQYLGFLFDGHSIFLRSTALARYSEKMKGGVKLAKKTMEKENRIRKSKGEPEQDQLYKRKLHRLYSYRGRRNFLSYGYRAAKIMNSKSIKRQLKPLWQRLQDEISK

SEQ ID NO: 567 - protein, 433 aa, Vibrio parahaemolyticus; identical to SEQ ID NO: 566

SEQ ID NO: 568 - protein, 445 aa, Klebsiella variicola
MTAVRNRPGFTIVENPLMVYREHSWFRKRGYLHFDKPISEEHALNIVTDPYAVATHSFLPFITFTSTTFKVQKDKGTNAINKTIKERPIAYSSHVDSHIYSYYASILNELYEEELKKNNITDNVLAFRALNKSNIEFAYDAFQEIKKRGNCSAVALDLSKFFDTLDHSFLKKSWCQLLTAEKLPEDHYAVFKAITKFSKVDKNEVYELMGLPKNNAKHTKKTRKQICSFEDFRNKVRQSNLIIPNKANFGIPQGSPISALLSNIYMLNFDTEMKQYVSSLGGAYFRYCDDMLFIVPTHEKNNVAGEAEKRLFKLKVSLNIKKTEIRDFFVTPNKIKCDKPLQYLGFIFDGHNIFLRSSSLSRYSDRMKRGVRLAKATMKSKNKLRNSKGLPNKELFKEKVYARYAHVGKRNFLTYGYRASRIMHSNSIRKQLKPLWERLQKEIHR

SEQ ID NO: 569 - protein, 214 aa, Vibrio fluvialis
MSVPLWYTKRNYLHFDVPVSGTKAEKIVTSTTSVARHAFFPFISYSFQLTKLDRDTSTGKLYRKPKPREVAYSSHIDSHIYAYYANQLSNLYEQKVEKSGLHESVLAFRKLDGKSNIHFADDAFNYIRKMKECSVIALDFSKFFNTLDHRILKEEWSKLLQVKHLPKDHYNVFRSLTKFSTVDRNELFKTFGISQYNQKANGRNDLHQQDWTPC

SEQ ID NO: 570 - protein, 214 aa, Vibrio fluvialis; identical to SEQ ID NO: 569

SEQ ID NO: 571 - protein, 433 aa, Vibrio cholerae
MSVPLWYTKRNYLHFDVPVSGTKAEKIVTSTTSVARHAFFPFISYSFQLTKLDRDTSTGKLYRKPKPREVAYSSHIDSHIYAYYANQLSNLYEQKVEKSGLHESVLAFRKLDGKSNIHFADDAFNYIRKMKECSVIALDFSKFFNTLDHRILKEEWSKLLQVKHLPKDHYNVFRSLTKFSTVDRNELFKTFGISQYNQKANGRNRVCTPLEFREKVRGSGLIKPNPNGAMGIPQGSPISALLSNIYMFSFDKHMKNYVDSIGGKYFRYCDDMLLIVPSEYRDTVEKLANSKIAALKVQINSDKTEIRDFKFHNGQLLSFDEFGKQKPLQYLGFLFDGHSIFLRSTALARYSEKMKGGVKLAKKTMEKENRIRKSKGEPEQNQLYKRKLHRLYSYRGRRNFLSYGYRAAKIMNSKSIKRQLKPLWQRLQDEISK

SEQ ID NO: 572 - protein, 433 aa, Vibrio parahaemolyticus
MSAPLWYTKRNYLHFDVPVSGTKAEKIVASTTSVARHAFFPFISYSFQLTKLDRDTSTGKLYRKPKPREVAYSSHIDSHIYAYYANQLSNLYEQKVEKSGLHESVLAFRKLDGKSNIHFADDAFNYIRKMKECSVIALDFSKFFNTLDHRILKEEWSKLLQVKHLPKDHYNVFRSLTKFSTVERDELFKTFGISQYNQKANGRNRVCTPLEFREKVRGSGLINPNPNGAMGIPQGSPISALLSNIYMFSFDKHMKNYVDSIGGKYFRYCDDMLFIVPSEYRDTVEKLANSKITALKVQINSDKTEIRDFKFHNGQLCSFDEFGKQKPLQYLGFLFDGHSIFLRSTALARYSEKMKGGVKLAKKTMEKENRIRKSKGEPEQNQLYKRKLHRLYSYRGRRNFLSYGYRAAKIMNSKSIKRQLKPLWQRLQDEISK

SEQ ID NO: 573 - protein, 425 aa, Klebsiella pneumoniae
MNNDDYPWFRKRGYLHFDEPVSLKKAVKYVSSPEKIIKHSFLPFLSFEVKSFKIKKDKSTKQLSKTEKLRPIAYSSHLDSHIYAFYAEYLTGHYELLIQENNLHENILAFRSLNKSNIEFAERAFDTITEMGECSAVALDLSGFFDNLDHQILKHQWCKVIGTEALPQDHFAIYKSITRYSKVDKNRAYEILGISKNNPKYNRRKICTPVDFRNKIRKNGLIIVNNSQKGIPQGSPISALLSNIYMLDFDIEMRDYAQERGGHYYRYCDDMLFIVPTKYNKTLAGDVAQRIKHLKVELNTKKTEIRDFIYKDSTLVANMPLQYLGFIFDGSNILLRSSSLARYSERMKRGVRLAKATMDSKNRIRENKGEALKALFKKKLYARYSHIGRRNFLTYGYRAAKIMNSKAIKRQLKPLQKRLENEILK

SEQ ID NO: 574 - protein, 425 aa, Klebsiella pneumoniae; identical to SEQ ID NO: 573

SEQ ID NO: 575 - protein, 433 aa, Vibrio alginolyticus
MSVPLWYTKRNYLHFDVPVSGTKAEKIVTSATSVARHAFFPFISYSFQLTKLDRDRSTGKLYRKPKPRGVAYSSHIDSHIYAYYASQLSSLYEHKVEKFGLHESVLAFRKLDGKSNIHFADDAFNYIRENGECSVIALDFSKFFDTLDHKILKEEWSKLLQVNSLPKDHYNVFRSLTKFSTVDRDELFKVFEISQYNPKANGRNRVCNPTEFREKVRGSGLIKPNPNGAMGIPQGSPISALLSNIYMFSFDEHMKNYVDSIGGKYFRYCDDMLFIVPSEYRGTIEKLANSKIAALKVQINSDKTEIRDFKFHNGQLCSFDEFGKQKPLQYLGFLFDGHSIFLRSTALARYSEKMKGGVKLAKKTMEKENRIRKSKGEPEQDQLYKRKLHRLYSYRGRRNFLSYGYRAAKIMNSKSIKRQLKPLWQRLQDEISK

SEQ ID NO: 576 - protein, 433 aa, Vibrio alginolyticus; identical to SEQ ID NO: 575

SEQ ID NO: 577 - protein, 433 aa, Vibrio alginolyticus
MSAPLWYTKRNYLHFDVPVSGTKAEKIVTSTTSVARHAFFPFISYSFQLTKLDRDTSTGKLYRKPKPREVAYSSHIDSHIYAYYANQLSNLYEQKVEKSGLHEAVLAFRKLDGKSNIHFADDAFNYIRKMKECSVIALDFSKFFNTLDHRILKEEWSKLLQVKHLPKDHYNVFRSLTKFSTVDRDELFKTFGISQYNQKANGRNRVCTPLEFREKVRGSGLIKPNPNGSMGIPQGSPISALLSNIYMFSFDKHMKNYVDSIGGKYFRYCDDMLFIVPSEYRDTVEKLANSKIAALKVRINSDKTEIRDFKLHNGQLLSFDEFGKQKPLQYLGFLFDGHSIFLRSTALARYSEKMKGGVKLAKKTMEKENRIRKSKGEPEQNQLYKRKLHRLYSYRGRRNFLSYGYRAAKIMNSKSIKRQLKPLWQRLQDEISK

SEQ ID NO: 578 - protein, 425 aa, Klebsiella pneumoniae
MNNDDYPWFRKRGYLHFDEPVSLKKAVKYVSSPEKIIKHSFLPFLSFEVKSFKIKKDKSTKQLSKTEKLRPIAYSSHLDSHIYAFYAEYLTGHYELLIQENNLHENILAFRSLNKSNIEFAKRAFDTITEMGECSAVALDLSGFFDNLDHQILKHQWCKVIGTEALPQDHFAIYKSITRYSKVDKNKAYEILGISKNNPKYNRRKICTPVDFRNKIRKNGLIIVNNSQKGIPQGSPISALLSNIYMLDFDIEMRDYAQERGGHYYRYCDDMLFIVPTKYNKTLAGDVAQRIKHLKVELNTKKTEIRDFIYKDSTLVANMPLQYLGFIFDGSNILLRSSSLARYSERMKRGVRLAKATMDSKNRIRENKGEALKALFKKKLYARYSHIGRRNFLTYGYRAAKIMNSKAIKRQLKPLQKRLENEILK

SEQ ID NO: 579 - protein, 425 aa, Klebsiella pneumoniae; identical to SEQ ID NO: 578

SEQ ID NO: 580 - protein, 428 aa, Klebsiella pneumoniae; identical to SEQ ID NO: 253

SEQ ID NO: 581 - protein, 445 aa, Klebsiella pneumoniae
MTAVRNRPGFTIVENPLMVYREHSWFRKRGYLHFDKPISEEHALNIVTDPYAVATHSFLPFITFTSTTFKVQKDKGTNAINKTIKERPIAYSSHVDSHIYSYYASILNELYEEELKKNNITDNVLAFRALNKSNIEFAYDAFQEIKKRGNCSAVALDLSKFFETLDHSFLKKSWCQLLTAEKLPEDHYAVFKAITKFSKVDKNEVYELMGLPKNNAKHTKKTRKQICSFEDFRNKVRQSNLIIPNKANFGIPQGSPISALLSNIYMLNFDTEMKQYVSSLGGAYFRYCDDMLFIVPTHEKNNVAGEAEKRLFKLKVSLNIKKTEIRDFFVTPNKIKCDKPLQYLGFIFDGHNIFLRSSSLSRYSDRMKRGVRLAKATMKSKNKLRNSKGLPNKELFKEKVYARYAHVGKRNFLTYGYRASRIMHSNSIRKQLKPLWERLQKEIHR

SEQ ID NO: 582 - protein, 425 aa, Klebsiella pneumoniae
MNNDDYPWFRKRGYLHFDEPVSLKKAVKYVSSPEKIIKHSFLPFLSFEVKSFKIKKDKSTKQLSKTEKLRPIAYSSHLDSHIYAFYAEYLTGHYELLIQENNLHENILAFRSLNKSNIEFAKRAFDTITEMGECSAVALDLSGFFDNLDHQILKHQWCKVIGTEALPQDHFAIYKSITRYSKVDKNRAYEILGISKNNPKYNRRKICPPVDFRNKIRKNGLIIVNNSQKGIPQGSPISALLSNIYMLDFDIEMRDYAQERGGHYYRYCDDMLFIVPTKYNKTLAGDVAQRIKHLKVELNTKKTEIRDFIYKDSTLVANMPLQYLGFIFDGSNILLRSSSLARYSERMKRGVRLAKATMDSKNRIRENKGEALKALFKKKLYARYSHIGRRNFLTYGYRAAKIMNSKAIKRQLKPLQKRLENEILK

SEQ ID NO: 583 - protein, 429 aa, Cupriavidus basilensis; identical to SEQ ID NO: 254

SEQ ID NO: 584 - protein, 366 aa, Pseudomonas syringae
MVKKDPKKRQISYAAHLDSHIYSYYCEVLSDLYERYLSTTEWSASVLAFRTLGNSNIEFAYEAFMDIASRTECCVVGIDIKGFFDNLSHTRLKSSWQKLIDRPSLPDDHFAVYKSLTRFSFVDREEVYSALGISKNNPKNGRQRICEPHQFRSAIRGAGLVETNSIGKGIPQGSPISALLSNIYMMDFDEKLYSYVETHGGSYFRYCDDILLIVPLAKEAEAIQFVDDEVAAIKLEVQKTKTEVCRFKKTAKGFRSDRALQYLGFIFDGENIYLRSSSLARYQERVNRGLSIATLSMQKVNTARIARGQLPRSIFLRKLHSRYSYLGRRNFISYGYRAARIMNSKSIRKQLKPLWGRLRKKIEDIA

SEQ ID NO: 585 - protein, 292 aa, Pseudomonas syringae; identical to SEQ ID NO: 256

SEQ ID NO: 586 - protein, 427 aa, Photobacterium leiognathi
MKILIKDWFKPRKYIHFDLPINSKKASKIVTDSEVVAKHAFYPLINYDIVINKITKNPITKNIMVLEPKPRPISYPAHIDSHIYSYYSKILNYKYEKMIKENGLSDSILAFRTLGKSNIDFSLNAFNEIKKLGECSAVALDITKFFDTLDHETLKLKWCNLLDVKRLPNDHYNIFKSITKYSKVKKEDLYKALGISLNNPNKKRRRICEPHDFRGIVRKYKLIKVHKDSFGIPQGTPLSAMLSNIYMFDFDLKMNSFITQFGGKYFRYCDDILFIIPTEYKNIVEQTASIEIENLKLELNKKKTEIRNFQFKDNKLKSDKPLQYLGFIFDGKEIYIRSSSLARYSSRMHKGVRLAKNTMIKYNKIRRANQEEERLIFKRKLYSRYSHLGKRNFITYGYSAAKKMNSSSIRRQLSPLFGRLNSEINKI

SEQ ID NO: 587 - protein, 427 aa, Photobacterium leiognathi; identical to SEQ ID NO: 586

SEQ ID NO: 588 - protein, 425 aa, Pseudomonas parafulva
MSNAWYKSRRYLHFDRPVNEDAALKVVSDQRAVARHSFYPLIRYVAESQKVHFDKAAGRVVKKDPKKRQISYAAHLDSHIYSYYCEVLSDLYERYLRTTEWSASVLAFRTLGKSNIEFAYEAFMDIASRTECCVVGIDIKGFFDNLSHAHLKSSWQKLIDRPSLPDDHFAVYKSLTRFSFVDREEVYSALGISKNNPKNGRQRICEPHQFRSAIRGAGLVETNSIGKGIPQGSPISALLSNIYMMDFDEKLYSYVETHGGSYFRYCDDILLIVPLAKEAEAIQFVDDEVAAIKLEVQKTKTEVCRFKKTVKAFRSDRALQYLGFIFDGENIYLRSSSLARYQERVNRGLSIATLSMQKVNTARIARGQLPRSIFLRKLHSRYSYLGRRNFISYGYRAARIMNSKSIRKQLKPLWGRLRKKIEDIA

SEQ ID NO: 589 - protein, 425 aa, Pseudomonas parafulva; identical to SEQ ID NO: 588

SEQ ID NO: 590 - protein, 425 aa, Aeromonas caviae
MMNSENQWFRSRGYLHFDSPVKLRKACQIVKSPLNVAHHAFLPLISYDIHSFKISIDKDGNVQKKIKERPISYASHIDSHIYSYYAELLSNVYEKALHELQLKDSVLAFRSLGKSNIDFANTAFEKIKAHGDCTAIAMDISGFFDNLDHVILKSMWCKLLQENSLPDDHFNIYCSLTKSSTVNRDLLYAALKISRNNPKSTGARLCDIKTFRDKIRGLGLIKTNSTGRGIPQGTSISALLSNIYMLDFDKKIKDMVVSISGEYYRYCDDMLFIIDSDKTSELISIVTQSISELKIEINDKKTEVRNFHVYSGVQKCDKPLQYLGFIFDGERKLIRSAALARFSGRMKAGVRLAKKTHQKANLIEEKNGVAKTPLFKKKIYERYSHLSKRNFITYGHKAANIMGSNAIKKQLKPLWGRLLKEINEQ

SEQ ID NO: 591 - protein, 425 aa, Pseudomonas syringae
MSNAWYKSRRYLHFDRPVNEDAALKVVSDQRAVARHSFYPLIRYVAESQKVHFDKAAGRVVKKDPKKRQISYAAHLDSHIYSYYCEVLSDLYERYLSTTEWSASVLAFRTLGNSNIEFAYEAFMDIASRTECCVVGIDIKGFFDNLSHTRLKSSWQKLIDRPSLPDDHFAVYKSLTRFSFVDREEVYSALGISKNNPKNGRQRICEPHQFRSAIRGAGLVETNSIGKGIPQGSPISALLSNIYMMDFDEKLYSYVETHGGSYFRYCDDILLIVPLAKEAEAIQFVDDEVAAIKLEVQKTKTEVCRFKKTAKGFRSDRALQYLGFIFDGENIYLRSSSLARYQERVNRGLSIATLSMQKVNTARIARGQLPRSIFLRKLHSRYSYLGRRNFISYGYRAARIMNSKSIRKQLKPLWGRLRKKIEDIA

SEQ ID NO: 592 - protein, 425 aa, Pseudomonas syringae
MSNAWYKSRRYLHFDRPINEDAALKVVSDQRAVARHSFYPLIRYVAESQKVHFDKAAGRVLKKDPKKRQISYAAHLDSHIYSYYCEVLSNLYERYLSTTEWSASVLAFRTLGKSNIEFAYEAFMDIASRTECCVVGIDIKGFFDNLSHTHLKSSWQKVIDRPSLPDDHFAVYKSLTRFSFVDRVEVYSALGISKNNPKNGRQRICDPHQFRSAIRGAGLVETNSIGKGIPQGSPISALLSNIYMMDFDKKLYSYVETHGGSYFRYCDDILLIVPLAKEADAIQFVDDEVAAIKLEVQKTKTEVCRFKKTPKGFRSDRALQYLGFIFDGENIYLRSSSLARYQERVNRGLSIAALSMQKVNTVRIARGQMPRSIFLRKLHSRYSYLGRRNFISYGYRAARIMNSKSIRKQLKPLWGRLRKKIEDIA

SEQ ID NO: 593 - protein, 425 aa, Pseudomonas syringae; identical to SEQ ID NO: 592

SEQ ID NO: 594 - protein, 423 aa, Burkholderia pseudomallei
MENPAEWYRRRTYLHFDMPISEKAACAIASNPAVVTRHAFYPFITFTIKSQKVKWDSASKKLSLIPKERPVSYASHVDSHIYAYYAALLSGKYENRLKSADFEPAVLAFRKLGKSNIHFAKDAFSAIKQLGNADVITTDIRDFFGNLDHQILKSAWRSILGVDALPDDHYNVYKSLTRFSWVEKRNLYAALHISLNNPRASGPRVCEPEDFRKIVRGCKLINKNPHSKGIPQGSPISALLSNIYMVNFDEMMWNAVTAWGGKYFRYCDDMLIIAPQGKGKDLLKLAQEFSDLHKLPLHPDKTEERTFTMTVDGLVADKPLQYLGFLFDGKRIILRSASLARYSDRMKRGVRLAKATMRRRNDLRVTRGETPIPLRKRKLFKRYSYLGRRNFVSYALRAAGILEAQAIKRQVKPLWKRLRKQMG

SEQ ID NO: 595 - protein, 423 aa, Burkholderia pseudomallei; identical to SEQ ID NO: 594

SEQ ID NO: 596 - protein, 425 aa, Aeromonas caviae
MMNSENQWFRSRGYLHFDSPVKLRKACQIVKSPLNVAHHAFLPLISYDIHSFKISIDKDGNVQKKIKERPISYASHIDSHIYSYYAELLSNVYEKALHELQLKDSVLAFRSLGKSNIDFANTAFEKIKAHGDCTAIAMDISGFFDNLDHVILKSMWCKLLQENSLPDDHFNIYCSLTKSSTVNRDLLYAALKISRNNPKSTGARLCDIKTFRDKIRGLGLIKTNSTGRGIPQGTSISALLSNIYMLDFDKKIKDMVISISGEYYRYCDDMLFIIDSDKTSELISIVTQSISELKIEINDKKTEVRNFHVYRGVQKCDKPLQYLGFIFDGERKLIRSAALARFSGRMKAGVRLAKKTHQKANLIEEKNGVAKTPLFKKKIYERYSHLSKRNFITYGHKAANIMGSNAIKKQLKPLWGRLLKEINEQ

SEQ ID NO: 597 - protein, 425 aa, Aeromonas caviae; identical to SEQ ID NO: 596

SEQ ID NO: 598 - protein, 428 aa, Pectobacterium brasiliense; identical to SEQ ID NO: 257

SEQ ID NO: 599 - protein, 427 aa, Photobacterium leiognathi; identical to SEQ ID NO: 258

SEQ ID NO: 600 - protein, 427 aa, Janthinobacterium sp.
MNSRKKHPWYRHRGYPHFDHPIKFTEAEALVKDSVQVSKHSFYPFIEFTIESFKVKRTGPEGKLKRIQKLRPIAYASHVDCHIYSYYSLQLGKKYEQEISRRNLQDCVLAFRSLAKSNVDFAFEAFEAIRNFGKCEAIALDVTGFFDNLDHVLLKNVWAGLLGQSQLPADHYAVFKSLTKYSTVNLEKLYSLLGVSMNNRNTAPLRLCTAQEFRSKIRGSKLVVKHPLKKGIPQGSPISALLSNLYMLDYDSAMKDFVDTVGGHYFRYCDDILLIVPPGFKATVESLAVSEITKLLLDVNPKKTDRVDFVLTTSGLRASTPLQYLGFLFDGQRILLRSASLARYSERMRTGVRLAKATMRKRNAVRVDRGEAARPLFRKKLNSQYSHLGRRNFITYGYDAARRMESQAIRKQLRVLWKRLQNEIDSD

SEQ ID NO: 601 - protein, 430 aa, Duganella sp.; identical to SEQ ID NO: 261

SEQ ID NO: 602 - protein, 424 aa, Aeromonas hydrophila
MNSENKWFRSLGYLHFDSPVKLRKACKIVKSPLNVAQHAFFPLIKYDIQSLKISIDKDGNVLKKIKTRPISYASHVDSHIYSYYAELLSDLYEKTLSESQLKDSVLAFRSLGKSNIDFANIAFEKIKSYGNCTAIAMDISGFFDNLDHEILKTMWYKLLQENSLPNDHFNIYRSLTKSSVVNRDMLYTALKVSKNNPNTAGLRLCDIKTFREKVRGLELIKTNLTGKGIPQGTSISALLSNIYMLDFDKKIKEIVTSISGEYYRYCDDMLFIVDSNKTSDLISQVTHNITELKIEINDKKTEIRTFHTHRGVQKCDKPLQYLGFIFDGERKLIRSAALARFSGRMKAGVRLAKKTHQKANLIEEKEGLAKTPLFKKKIYERYSHLSKRNFITYGHRAANIMGSHAIRKQLKPLWGRLIKEINEK

SEQ ID NO: 603 - protein, 424 aa, Aeromonas hydrophila; identical to SEQ ID NO: 602

SEQ ID NO: 604 - protein, 436 aa, Vibrio casei; identical to SEQ ID NO: 263

SEQ ID NO: 605 - protein, 425 aa, Aeromonas veronii; identical to SEQ ID NO: 264

SEQ ID NO: 606 - protein, 436 aa, Vibrio splendidus; identical to SEQ ID NO: 266

SEQ ID NO: 607 - protein, 182 aa, Pseudomonas syringae
MSNAWYKSRRYLHFDRPVNEDAALKVVSDQRAVARHSFYPLIRYVAESQKVHFDKAAGRVVKKDPKKRQISYAAHLDSHIYSYYCEVLSDLYERYLSTTEWSASVLAFRTLGKSNIEFAYEAFMDIASRTECCVVGIDIKGFFDNLSHTRLKSSWQKLIDRPSLPDDHFAVYKSLTREALQK

SEQ ID NO: 608 - protein, 182 aa, Pseudomonas syringae; identical to SEQ ID NO: 607

SEQ ID NO: 609 - protein, 70 aa, Pseudomonas amygdali
MSNAWYKSRRYLHFDRPVNEDAALKVVSDQRAVARHSFYPLIRYVAESQKVHFDKAAGRVVKKDPKEALQ

SEQ ID NO: 610 - protein, 436 aa, Photobacterium phosphoreum; identical to SEQ ID NO: 268

SEQ ID NO: 611 - protein, 436 aa, Photobacterium phosphoreum; identical to SEQ ID NO: 269

SEQ ID NO: 612 - protein, 427 aa, Photobacterium leiognathi
MKILIKDWFKPRKYIHFDLPINSKKASKIVTDSEVVAKHAFYPLINYDIVINKITKNPITKNIMVLEPKPRPISYPAHIDSHIYSYYSKILNYKYEKMIKENGLSDSILAFRTLGKSNIDFSLNAFNEIKKLGECSAVALDITKFFDTLDHETLKLKWCNLLDVKRLPNDHYNIFKSITKYSKVKKEDLYKALGISLNNPNKKRRRICEPHDFRGIVRKYKLIKVHKDSFGIPQGTPLSAMLSNIYMFDFDLKMNSFITQFGGKYFRYCDDILFIIPTEYKNIVEKTASIEIENLKLELNKKKTEIRNFQFKDNKLKSDKPLQYLGFIFDGKEIYIRSSSLARYSSRMHKGVRLAKNTMIKYNKIRRANQEEERLIFKRKLYSRYSHLGKRNFITYGYSAAKKMNSSSIRRQLSPLFGRLNSEINKI

SEQ ID NO: 613 - protein, 427 aa, Photobacterium leiognathi; identical to SEQ ID NO: 612

SEQ ID NO: 614 - protein, 436 aa, Photobacterium kishitanii; identical to SEQ ID NO: 270

SEQ ID NO: 615 - protein, 427 aa, Photobacterium sp.; identical to SEQ ID NO: 271

SEQ ID NO: 616 - protein, 423 aa, Paraburkholderia sp.; identical to SEQ ID NO: 273

SEQ ID NO: 617 - protein, 425 aa, Chromatocurvus halotolerans; identical to SEQ ID NO: 274

SEQ ID NO: 618 - protein, 423 aa, Paraburkholderia sp.; identical to SEQ ID NO: 276

SEQ ID NO: 619 - protein, 423 aa, Burkholderia stabilis; identical to SEQ ID NO: 277

SEQ ID NO: 620 - protein, 425 aa, Nitrincola iocasae; identical to SEQ ID NO: 279

SEQ ID NO: 621 - protein, 428 aa, Klebsiella michiganensis; identical to SEQ ID NO: 280

SEQ ID NO: 622 - protein, 202 aa, Aeromonas media
MWCKLLQKNSLPNDHFNIYRSLTKSSVVNRDLLYTALKISKNNPKTAGLRLCDINTFREKVRGLELIKTNSTGRGIPQGTSISALLSNIYMLDFDKKIKDIVKSISGEYYRYCDDMLFIIDSDNTSELMSLVTQSISELKIEINDKKTEIRTFHTYRGVQKCDKPLQYLGFIYDGERKLIRSAALAREGANKSPNAKKRLCK

SEQ ID NO: 623 - protein, 152 aa, Aeromonas media
MNSENKWFRSRGYLHFDSPVKLRKACQIVKSPLNVAQHAFFPLIKYDIQSLKISIDKDGNVLKKIKTRPISYASHIDSHIYSYYAELLSDLYEKALDKSQLQDSVLAFRALGKSNIDFANIAFEKIKAHNDCTAIAMDISGFFDNLDHEILK

SEQ ID NO: 624 - protein, 170 aa, Aeromonas media
MYTALKISKNNPKTAGLRLCDINTFREKVRGLELIKTNSTGRGIPQGTSISALLSNIYMLDFDKKIKDIVKSISGEYYRYCDDMLFIIDSDNTSELMSLVTQSISELKIEINDKKTEIRTFHTYRGVQKCDKPLQYLGFIYDGERKLIRSAALAREGANKSPNAKKRLCK

SEQ ID NO: 625 - protein, 245 aa, Aeromonas hydrophila
MNSENKWFRSRGYLHFDSPVKLRKACKIVKSPLNVAQHAFFPLIKYDIQSLKISIDKDGNVLKKIKTRPISYASHVDSHIYSYYAELLSDLYEKTLSESQLKDSVLAFRSLGKSNIDFANIAFEKIKSYGNCTAIAMDISGFFDNLDHEILKTMWYKLLQENSLPNDHFNIYRSLTKSSVVNRDMLYTALKVSKNNPNTAGLRLCDIKTFREKVRGLELIKTNLTGKGIPQARIQLRSATLAYAA

SEQ ID NO: 626 - protein, 245 aa, Aeromonas hydrophila; identical to SEQ ID NO: 625

SEQ ID NO: 627 - protein, 424 aa, Aeromonas caviae
MNSENQWFRSRGYLHFDSPVKLRKACQIVKSPLNVAHHAFLPLISYDIHSFKISIDKDGNVQKKIKERPISYASHIDSHIYSYYAELLSNVYEKALHELQLKDSVLAFRSLGKSNIDFANTAFEKIKAHGDCTAIAMDISGFFDNLDHVILKSMWCKLLQENSLPDDHFNIYCSLTKSSTVNRDLLYAALKISRNNPKSTGARLCDIKTFRDKIRGLGLIKTNSTGRGIPQGTSISALLSNIYMLDFDKKIKDMVVSISGEYYRYCDDMLFIIDSDKTSELISIVTQSISELKIEINDKKTEVRNFHVYSGVQKCDKPLQYLGFIFDGERKLIRSAALARFSGRMKAGVRLAKKTHQKANLIEEKNGVAKTPLFKKKIYERYSHLSKRNFITYGHKAANIMGSNAIKKQLKPLWGRLLKEINEQ

SEQ ID NO: 628 - protein, 325 aa, Aeromonas dhakensis
MATVLYLSGFCNLRLNMMNSENQWFRSRGYLHFDSPVKLRKACQFVKSPLNVAHHAFLPLISYDIHSFKISIDKDGNVQKKIKERPISYASHIDSHIYSYYAELLSNVYEKALHELQLKESVLAFRSLGKSNIDFANTAFEKIKAHGDCTAIAMDISGFFDNLDHVILKSMWCKLLQENSLPNDHFNIYRSLTKSSTVNRDLLYAALKISRNNPKSTGARLCDIKTFRDKIRGLGLIKTNSTGKGIPQGTSISALLSNIYMLDFDKKIKDIVVSISGEYYRYCDDMLFIIDSDKTSELISIVTKSISELKIEINDKKTEVRREFR

SEQ ID NO: 629 - protein, 425 aa, Aeromonas dhakensis; identical to SEQ ID NO: 286

SEQ ID NO: 630 - protein, 291 aa, Aeromonas sp.
MMNSENQWFRSRGYLHFDSPVKLRKACQIVKSPINVAHHAFLPLISYDIHSFKISIDKDGNVQKKIKERPISYASHIDSHIYSYYAELLSNVYEKALHELQLKESVLAFRSLGKSNIDFANTAFEKIKAHGDCTAIAMDISGFFDNLDHVILKSMWCKLLQENSLPNDHFNIYRSLTKSSTVNRDLLYAALKISRNNPKSTGARLCDIKTFRDKIRGLGLIKTNSTGKGIPQGTSISALLSNIYMLDFDKKIKDIVVSISGEYYRYCDDMLFIIDSDKTSELISIVTKSIS

SEQ ID NO: 631 - protein, 291 aa, Aeromonas sp.; identical to SEQ ID NO: 630

SEQ ID NO: 632 - protein, 423 aa, Paraburkholderia sp.; identical to SEQ ID NO: 291

SEQ ID NO: 633 - protein, 86 aa, Shewanella sp.
MLKETPKWYRSRGYLHFDLPINQEKATLLVTSPSRVAKHPFFPLISYVVLSKKISKDQSTGTLNVVTKDRPIAYSAHKDSHIVVAH

SEQ ID NO: 634 - protein, 427 aa, Pseudomonas chlororaphis
MPENWFKSRGYLHFDRPINQAAALEIVSSPKTVAKHAFYPFIRYVAQTQKVFFDKSIGKVVKKDPKQRPISYAAHVDSHIYSYYCDLLNQAYEEHLAKVRWASAILAFRALGKSNIDFARDAFLDIAARKSCCVIAIDIKGFFDNLDHTHLKNAWQAILDTSHLPDDHYAIFRSLTKYSFVYRDQVYEALGLSKNNPKQGRKRICEPHEFRAKVRDGGLIETNKDKKGIPQGSPISALLSNVYMMGFDEQIHAYVQSCGGSYYRYCDDVLLIVPLEKEAEAKALVDLRVNEIGLEIQTAKTETCKFTRSVKGLRSDRPLQYLGFIFDGANIYLRSSSLARYQDRVNRGIWLAGKCMDKVNAKRIARGQLPRSMFLKKLYKRYSYLGRRNFISYGYRAARIMSAPSIKKQLKPHWNRLRERISDAQGE

SEQ ID NO: 635 - protein, 427 aa, Pseudomonas chlororaphis; identical to SEQ ID NO: 634

SEQ ID NO: 636 - protein, 428 aa, Cronobacter sakazakii; identical to SEQ ID NO: 295

SEQ ID NO: 637 - protein, 436 aa, Vibrio cyclitrophicus; identical to SEQ ID NO: 297

SEQ ID NO: 638 - protein, 428 aa, Escherichia coli
MVYREHSWFRKRGYLHFDKPISEEHALNIVTDPYAVATHSFLPFITFTSTTFKVQKDKGTNAINKTIKERPIAYSSHVDSHIYSYYASILNELYEEELKKNNITDNVLAFRALNKSNIEFAYDAFQEIKKRGNCSAVALDLSKFFDTLDHSFLKKSWCQLLTAEKLPEDHYAVFKAITKFSKVDKNEVYELMGLPKNNAKHTKKTRKQICSFEDFRNKVRQSNLIIPNKANFGIPQGSPISALLSNIYMLNFDTEMKQYVSSLGGAYFRYCDDMLFIVPTHEKNNVAGEAEKRLFKLKVSLNIKKTEIRDFFVTPNKIKCDKPLQYLGFIFDGHNIFLRSSSLSRYSDRMKRGVRLAKATMKSKNKLRNSKGLPNKELFKEKVYARYAHVGKRNFLTYGYRASRIMHSNSIRKQLKPLWERLQKEIHR

SEQ ID NO: 639 - protein, 428 aa, Klebsiella pneumoniae; identical to SEQ ID NO: 638

SEQ ID NO: 640 - protein, 429 aa, Enterobacter hormaechei; identical to SEQ ID NO: 299

SEQ ID NO: 641 - protein, 436 aa, Vibrio parahaemolyticus
MKKMSAPLWYTKRNYLHFDVPVSGTKAEKIVTSTTSVARHAFFPFISYSFQLTKLDRDTSTGKLYRKPKPREVAYSSHIDSHIYAYYANQLSNLYEQKVEKAGLHESVLAFRKLDGKSNIHFADDAFNYIRKMKECSVIALDFSKFFNTLDHRILKEEWSKLLQVKHLPKDHYNVFRSLTKFSTVERDELFKTFDISQYNQKANGRNRVCTPLEFREKVRGSGLINPNPNGAMGIPQGSPISALLSNIYMFSFDKHMKNYVDSIGGKYFRYCDDMLFIVPSEYRDTVEKLANSKIAALKVQINSDKTEIRDFKFHNGQLCSFDEFGKQKPLQYLGFLFDGHSIFLRSTALARYSEKMKGGVKLAKKTMEKENRIRKSKGEPEQNQLYKRKLHRLYSYRGRRNFLSYGYRAAKIMNSKSIKRQLKPLWQRLQDEISK

SEQ ID NO: 642 - protein, 436 aa, Vibrio parahaemolyticus; identical to SEQ ID NO: 641

SEQ ID NO: 643 - protein, 427 aa, Photobacterium angustum; identical to SEQ ID NO: 303

SEQ ID NO: 644 - protein, 428 aa, Klebsiella pneumoniae
MVYREHSWFRKRGYLHFDKPISEEHALNIVTDPYAVATHSFLPFITFTSTTFKVQKDKGTNAINKTIKERPIAYSSHVDSHIYSYYASILNELYEEELKKNNITDNVLAFRALNKSNIEFAYDAFQEIKKRGNCSAVALDLSKFFDTLDHSFLKKSWCKLLTAEKLPEDHYAVFKAITKFSKVDKNEVYELMGLPKNNAKHTKKTRKQICSFEDFRNKVRQSNLIIPNKANFGIPQGSPISALLSNIYMLNFDTEMKQYVSSLGGAYFRYCDDMLFIVPTHEKNNVAGEAEKRLFKLKVSLNIKKTEIRDFFVTPNKIKCDKPLQYLGFIFDGHNIFLRSSSLSRYSDRMKRGVRLAKATMKSKNKLRNSKGLPNKELFKEKVYARYAHVGKRNFLTYGYRASRIMHSNSIRKQLKPLWERLQKEIHR

SEQ ID NO: 645 - protein, 425 aa, Yersinia similis; identical to SEQ ID NO: 304

SEQ ID NO: 646 - protein, 429 aa, Enterobacter kobei
MESREHPWFRKRGYLHFDKPISIEHALDIVTNPRAVAAHSFLPFITFTSTTYKVQKDKGTNAINKTLKERPIAYSSHVDSHIYSYYAATLNELYENALQIHGISKNVLAFRSLHKSNIEFAYDAFQEIKKRGECSAVALDLSKFFDTLDHSFLKDAWCRLLSTDKLPEDHYAVFKAITKYSKVDKEKVYDLMDIPKNNAKYTKKTRKQICSFADFRDKVRKNALIISNKANFGIPQGSPISALLSNIYMLNFDIEMKDYVATLGGEYFRYCDDMLFIVPLSAKNNVAGEAEKRLNKLKVSLNTKKTEIREFSFASKKLKCDKPLQYLGFVFDGQNIFLRSSSLSRYSDRMKRGVRLAKATMKRKNNIRKHKGLAKKELFKEKIYARYAHVGKRNFLTYGYRASRIMKSNSIRKQLKPLWERLQKEINRS

SEQ ID NO: 647 - protein, 425 aa, Klebsiella aerogenes
MNNDDYLWFRKRGYLHFDEPVSLKKAVKYVSSPEKITKHSFLPFLSFEVKSFKIKKDKLTKQLSKTEKLRPIAYSSHLDSHIYAFYAEYLTGHYELLIQENNLHENILAFRSLNKSNIEFAKRAFDTITEMGECSAVALDLSGFFDNLDHQILKHQWCKVIGTEALPQDHFAIYKSITRYSKVDKNRAYEILGISKNNPKYNRRKICSPVDFRNKIRKNDLIIVNKAKKGIPQGSPISALLSNIYMLDFDIEMRDYAQELGGHYYRYCDDMLFIVPTKYNKTLAGDVAQRIKHLKVELNTKKTEIRDFIYKDNTLVANMPLQYLGFIFDGSNIFLRSSSLARYSERMKRGVRLAKATMDSKNRIRANKGETLKPLFKKKLYARYSHIGRRNFLTYGYRAAKIMNSKAIKRQLKPLQKRLQNEILK

SEQ ID NO: 648 - protein, 428 aa, Pantoea stewartii
MESREHPWFRKRGYLHFDKPISVEHALDIVTNPNSVATHSFLPFITFTSTTFKIHKDKGKNAIEKTIKERPIAYSSHIDSHIYSYYSEILDYLYEEQLHTHNISKNILAFRALGKSNIEFANAAFQEIKRRGNCSAVALDLSKFFDTLDHSILKDAWCRLLTTDILPRDHYAVFKAITKYSKVDKEKVYELMAIPKNNAKHAKKTRKQICSFAEFRNKVRKSNLIVPNKANFGIPQGSPISALLSNIYMLNFDIEMDQYASSLGGEYFRYCDDMLFIVPSHEKNNVAGEAEKRLIKLKVSLNVKKTEIREFKATPTKITSDKPLQYLGFIFDGENVFLRSSSLSRYSDRMKRGVKLAKATMKRKNKIRKHKGLPDKELFKEKVYARYAHVGKRNFLTYGYRASRIMKSTSIRKQLKPLWERLQKEIQK

SEQ ID NO: 649 - protein, 428 aa, Pantoea stewartii; identical to SEQ ID NO: 648

SEQ ID NO: 650 - protein, 451 aa, Pseudomonas amygdali
MGLSDRAAEGLPPSYARSVGSIQGGNMSNAWYKSRRYLHFDRPVNEDAALKVVSAQRAVARHSFYPLIRYVAESQKVHFDKAAGRVVKKDPKKRQISYAAHLDSHIYSYYCEVLSDLYERYLSTTEWSASVLAFRTLGKSNIEFAYEAFMDIASRTECCVVGIDIKGFFDNLSHTRLKSSWQKLIDRPSLPDDHFAVYKSLTRFSFVDREEVYSALGISKNNPKNGRQRICEPHQFRSAIRGAGLVETNSIGKGIPQGSPISALLSNIYMMDFDEKLYSYVETHGGSYFRYCDDILLIVPLAKEAEAIQFVDHEVAAIKLEVQKTKTEVCRFKKTAKGFRSDRALQYLGFIFDGENIYLRSSSLARYQERVNRGLSIATLSMQKVNTARIARGQLPRSIFLRKLHSRYSYLGRRNFISYGYRAARIMNSKSIRKQLKPLWGRLRKKIEDIA

SEQ ID NO: 651 - protein, 451 aa, Pseudomonas amygdali; identical to SEQ ID NO: 650

SEQ ID NO: 652 - protein, 425 aa, Pseudomonas amygdali
MSNAWYKSRRYLHFDRPVNEDAALKVVSAQRAVARHSFYPLIRYVAESQKVHFDKAAGRVVKKDPKKRQISYAAHLDSHIYSYYCEVLSDLYERYLSTTEWSASVLAFRTLGKSNIEFAYEAFMDIASRTECCVVGIDIKGFFDNLSHTRLKSSWQKLIDRPSLPDDHFAVYKSLTRFSFVDREEVYSALGISKNNPKNGRQRICEPHQFRSAIRGAGLVETNSIGKGIPQGSPISALLSNIYMMDFDEKLYSYVETHGGSYFRYCDDILLIVPLAKEAEAIQFVDHEVAAIKLEVQKTKTEVCRFKKTAKGFRSDRALQYLGFIFDGENIYLRSSSLARYQERVNRGLSIATLSMQKVNTARIARGQLPRSIFLRKLHSRYSYLGRRNFISYGYRAARIMNSKSIRKQLKPLWGRLRKKIEDIA

SEQ ID NO: 653 - protein, 433 aa, Vibrio sp.; identical to SEQ ID NO: 305

SEQ ID NO: 654 - protein, 436 aa, Photobacterium aquimaris; identical to SEQ ID NO: 306

SEQ ID NO: 655 - protein, 436 aa, Vibrio parahaemolyticus
MKKMSAPLWYTKRNYLHFDVPVSGTKAEKIVTSTTSVARHAFFPFISYSFQLTKLDRDTSTGKLYRKPKPREVAYSSHIDSHIYAYYANQLSNLYEQKVEKSGLHEAVLAFRKLDGKSNIHFADDAFNYIRKMKECSVIALDFSKFFNTLDHRILKEEWSKLLQVKHLPKDHYNVFRSLTKFSTVDRDELFKTFGISQYNQKANGRNRVCTPLEFREKVRGSGLIKPNPNGSMGIPQGSPISALLSNIYMFSFDKHMKNYVDSIGGKYFRYCDDMLFIVPSEYRDTVEKLANSKIAALKVQINSDKTEIRDFKFHNGQLLSFDEFGKQKPLQYLGFLFDGHSIFLRSTALARYSEKMKGGVKLAKKTMEKENRIRKSKGEPEQNQLYKRKLHRLYSYRGRRNFLSYGYRAAKIMNSKSIKRQLKPLWQRLQDEISK

SEQ ID NO: 656 - protein, 249 aa, Klebsiella pneumoniae
MVYREHSWFRKRGYLHFDKPISEEHALNIVTDPYAVATHSFLPFITFTSTTFKVQKDKGTNAINKTIKERPIAYSSHVDSHIYSYYASILNELYEEELKKNNITDNVLAFRALNKSNIEFAYDAFQEIKKRGNCSAVALDLSKFFDTLDHSFLKKSWCQLLTAEKLPEDHYAVFKAITKFSKVDKNEVYELMGLPKNNAKHTKKTRKQICSFEDFRNKVRQSNLIIPNKANFGIPQGSPIREGANKSEM

SEQ ID NO: 657 - protein, 249 aa, Klebsiella pneumoniae; identical to SEQ ID NO: 656

SEQ ID NO: 658 - protein, 231 aa, Klebsiella quasipneumoniae
MLNIQKKTRKQICSFEDFRNKVRQSNLIIPNKANFGIPQGSPISALLSNIYMLNFDTEMKQYVSSLGGAYFRYCDDMLFIVPTHEKNNVAGEAEKRLFKLKVSLNIKKTEIRDFFVTPNKIKCDKPLQYLGFIFDGHNIFLRSSSLSRYSDRMKRGVRLAKATMKSKNKLRNSKGLPNKELFKEKVYARYAHVGKRNFLTYGYRASRIMHSNSIRKQLKPLWERLQKEIHR

SEQ ID NO: 659 - protein, 231 aa, Klebsiella quasipneumoniae; identical to SEQ ID NO: 658

SEQ ID NO: 660 - protein, 215 aa, Klebsiella quasipneumoniae
MVYREHSWFRKRGYLHFDKPISEEHALNIVTDPYAVATHSFLPFITFTSTTFKVQKDKGTNAINKTIKERPIAYSSHVDSHIYSYYASILNELYEEELKKNNITDNVLAFRALNKSNIEFAYDAFQEIKKRGNCSAVALDLSKFFDTLDHSFLKKSWCKLLTAEKLPEDHYAVFKAITKFSKVDKNEVYELMGLPKNNAKHTKKNQKANLFFRRF

SEQ ID NO: 661 - protein, 215 aa, Klebsiella quasipneumoniae; identical to SEQ ID NO: 660

SEQ ID NO: 662 - protein, 423 aa, Burkholderia ubonensis; identical to SEQ ID NO: 312

SEQ ID NO: 663 - protein, 103 aa, Klebsiella pneumoniae
MVYREHSWFRKRGYLHFDKPISEEHALNIVTDPYAVATHSFLPFITFTSTTFKVQKDKGTNAINKTIKERPIAYSSHVDSHIYSYYASILNELYEEELKKNNI

SEQ ID NO: 664 - protein, 427 aa, Psychromonas; identical to SEQ ID NO: 314

SEQ ID NO: 665 - protein, 436 aa, Vibrio cyclitrophicus; identical to SEQ ID NO: 315

SEQ ID NO: 666 - protein, 428 aa, Cronobacter sakazakii; identical to SEQ ID NO: 317

SEQ ID NO: 667 - protein, 436 aa, Photobacterium angustum; identical to SEQ ID NO: 318

SEQ ID NO: 668 - protein, 428 aa, Cronobacter sakazakii
MESRDNPWFKRRGYLHFDKPISENHALNIVTNPNLVARHSFLPFITFTSTTFKVQKDKATDTINKISKTRPIAYSSHVDSHIYSYYASILNDLYEKELLARGISDCVLAFRTLNKSNIEFAHEAFEQIKLRGNCSAVALDLSKFFDTLDHLLLKGAWCRLLSTNELPQDHYAVFKSLTKFSKVDRNEVYDLIGISKNNAKHTKTIRKQICSFDDFRNKVRKSNLIISNKAGFGIPQGSPISALLSNIYMLDFDTEINKYISSLGGKYFRYCDDMLFIVPSSEKNNVAGEAEKRLFKLKVSLNIKKTEIRDFFVTPLKIKCDKPLQYLGFIFDGHNIFLRSSSLSRYSDRMKRGVRLAKATMKRKNKIRKTKGLSKKNLFKEKIYARYSHVGRRNFLTYGYRASRIMNSKSIRKQLKPLWERLQNEMEK

SEQ ID NO: 669 - protein, 425 aa, Klebsiella pneumoniae
MNNDDYPWFRKRGYLHFDEPVSLKKAVKYVSSPEKIIKHSFLPFLSFEVKSFKIKKDKSTKQLSKTEKLRPIAYSSHLDSHIYAFYAEYLTGHYELLIQENNLHENILAFRSLNKSNIEFAKRAFDTITEMGECSAVALDLSGFFDNLDHQILKYQWCKVIGTEALPQDHFAIYKSITRYSKVDKNRAYEILGISKNNPKYNRRKICTPVDFRNKIRKNGLIIVNNSQKGIPQGSPISALLSNIYMLDFDIEMRDYAQERGGHYYRYCDDMLFIVPTKYNKTLAGDVAQRIKHLKVELNTKKTEIRDFIYKDSTLVANMPLQYLGFIFDGSNILLRSSSLARYSERMKRGVRLAKATMDSKNRIRESKGEALKALFKKKLYARYSHIGRRNFLTYGYRAAKIMNSKAIKRQLKPLQKRLENEILK

SEQ ID NO: 670 - protein, 427 aa, Vibrio sp.; identical to SEQ ID NO: 321

SEQ ID NO: 671 - protein, 425 aa, Aeromonas veronii
MMNSENQWFRSRGYLHFDSPVKLRKACQIVKSPLNVAQHAFFPLIKYNIQSLKISIDKDGNVQKKIKTRPISYASHIDSHIYSYYAGLLSDLYEKALSESQLEESVLAFRSLGKSNIDFANIAFEKIKAHGDCTAIAMDISGFFDNLDHEILKSMWCKLLQEHSLPNDHFNIYRSLTKSSVVNRDLLYTALKISRNNPKAAGLRLCNIKTFREKVRGLGLIETNSTGRGIPQGTSISALLSNIYMLDFDKKIKDIVTSISGEYYRYCDDMLFIIDSDKNRELISLVTQSISELKIEINDKKTEIRTFHTCRGVQKCDKPLQYLGFIFDGERKLLRSAALARFSGRMKAGVRLAKKTHQKANLIEEKNGVAKTPLFKKKIYERYSHLSKRNFITYGHKAANIMGSNAIKRQLKPLWGRLLKEMNEQ

SEQ ID NO: 672 - protein, 425 aa, Aeromonas veronii; identical to SEQ ID NO: 671

SEQ ID NO: 673 - protein, 428 aa, Raoultella terrigena
MVYREHSWFRKRGYLHFDKPISEEHALNIVTDPYAVATHSFLPFITFTSTTFKIQKDKGTNAINKTIKERPIAYSSHVDSHIYSYYASILNELYEEELKKNNITDNVLAFRALNKSNIEFAYDAFQEIKDRGDCSAVALDLSKFFDTLDHSFLKKSWCQLLNTDTLPEDHYAVFKAITKFSKVDKNEVYELMGLPKNNAKHTKKTRKQICSFNDFRKKVRQNNLITPNKADFGIPQGSPISALLSNIYMLNFDTEMKQYVSSLGGAYFRYCDDMLFIVPTHEKNNVAGEAEKRLFKLKVSLNIKKTEIRDFFITPNKIKCDKPLQYLGFIFDGHNIFLRSSSLSRYSDRMKRGVRLAKATMKSKNKLRNSKGLPNKELFKEKVYARYAHVGKRNFLTYGYRASRIMHSNSIRKQLKPLWERLQKEIHR

SEQ ID NO: 674 - protein, 428 aa, Raoultella terrigena; identical to SEQ ID NO: 673

SEQ ID NO: 675 - protein, 425 aa, Aeromonas veronii
MMNSENQWFRSRGYLHFDSPVKLRKACQIVKSPLNVAQHAFFPLIKYNIQSLKISIDKDGNVQKKIKTRPISYASHIDSHIYSYYAGLLSDLYEKALSESQLEESVLAFRSLGKSNIDFANIAFEKIKAHGDCTAIAMDISGFFDNLDHEILKSMWCKLLQEHSLPNDHFNIYRSLTKSSVVNRDLLYTALKISRNNPKAAGLRLCNIKTFREKVRGLGLIETNSTGRGIPQGTSISALLSNIYMLDFDKKIKDIVTSISGEYYRYCDDMLFIIDSDKTRELISLVTQSISELKIEINDKKTEIRTFHTCRGVQKCDKPLQYLGFIFDGERKLLRSAALARFSGRMKAGVRLAKKTHQKANLIEEKNGVAKTPLFKKKIYERYSHLSKRNFITYGHKAANIMGSNAIKRQLKPLWGRLLKEMNEQ

SEQ ID NO: 676 - protein, 426 aa, Rheinheimera tangshanensis; identical to SEQ ID NO: 322

SEQ ID NO: 677 - protein, 429 aa, Enterobacter asburiae
MESREHPWFRKRGYLHFDKPISIEHALDIVTNPRAVAAHSFLPFITFTSTTYKVQKDKGTNAINKTLKERPIAYSSHVDSHIYSYYAATLNELYENALQIHGISKNVLAFRSLHKSNIEFAYDAFQEIKKRGECSAVALDLSKFFDTLDHSFLKDAWCRLLSTDKLPEDHYAVFKAITKYSKVDKEKVYDLMGIPKNNAKYTKKTRKQICSFADFRDKVRKNALIISNKANFGIPQGSPISALLSNIYMLNFDIEMKDYVATLGGEYFRYCDDMLFIVPQSAKNNVAGEAEKRLNKLKVSLNTKKTEIREFSFVSKKIKCDKPLQYLGFVFDGQNIFLRSSSLSRYSDRMKRGVRLAKATMKRKNNIRKHKGLAKKELFKEKIYARYAHVGKRNFLTYGYRASRIMKSNSIRKQLKPLWERLQKEINRS

SEQ ID NO: 678 - protein, 429 aa, Enterobacter asburiae; identical to SEQ ID NO: 677

SEQ ID NO: 679 - protein, 428 aa, Leclercia adecarboxylata; identical to SEQ ID NO: 323

SEQ ID NO: 680 - protein, 429 aa, Escherichia coli
MESREHPWFRKRGYLHFDKPISIEHALDIVTNPRAVAAHSFLPFITFTSTTYKVQKDKGTNAINKTLKERPIAYSSHVDSHIYSYYAATLNELYENALQIHGISKNVLAFRSLHKSNIEFAYDAFQEIKKRGECSAVALDLSKFFDTLDHSFLKDAWCRLLSSDKLPEDHYAVFKAITKYSKVDKEKVYDLMDIPKNNAKYTKKTRKQICSFADFRDKVRKNALIISNKANFGIPQGSPISALLSNIYMLNFDIEMKDYVATLGGEYFRYCDDMLFIVPQSAKNNVAGEAEKRLNKLKVSLNTKKTEIREFSFASKKLKCDKPLQYLGFVFDGQNIFLRSSSLSRYSDRMKRGVRLAKATMKRKNNIRKHKGLAKKELFKEKIYARYAHVGKRNFLTYGYRASRIMKSNSIRKQLKPLWERLQKEINRS

SEQ ID NO: 681 - protein, 429 aa, Escherichia coli; identical to SEQ ID NO: 680

SEQ ID NO: 682 - protein, 425 aa, Nitrogeniibacter mangrovi; identical to SEQ ID NO: 327

SEQ ID NO: 683 - protein, 423 aa, Burkholderia contaminans; identical to SEQ ID NO: 330

SEQ ID NO: 684 - protein, 428 aa, Klebsiella grimontii; identical to SEQ ID NO: 331

SEQ ID NO: 685 - protein, 428 aa, Pantoea sp.; identical to SEQ ID NO: 334

SEQ ID NO: 686 - protein, 204 aa, Pseudoalteromonas sp.
MDDDTPSWYRSRGYLHFDVPVGKKKAIHITTNPNYIKRHSFYPFINYAVSSKKINKDKSTGKILVKNKERPIAYSSHLDSHIYAFYSEKLNALYEDKLLEYGLEKSVLAFRSLGKSNIDFAYEAFIKIKEMGECCAVALDFSKFFDTLNHDLLKKSWCKLINKDKLPSDHFNVFKSITKFSTVDKMDLYELFSISKSNPKIRAC

SEQ ID NO: 687 - protein, 129 aa, Arsenophonus apicola; identical to SEQ ID NO: 63

SEQ ID NO: 688 - protein, 220 aa, Arsenophonus apicola
MCSFEDFRNKIRKANLITPNKTNFGIPQGSPISALLSNIYMLNFDIEMNNYVSLLGGVYFRYCDDMLFIVPSHEKNNVADEAQKRLLKLKVSLNTKKTEIRKFVATPSKIKCDKPLQYLGFIFDGDNIFLRSSSLSRYSDRMKRGVRLAKATMKRKNKIRKFKGLPKKELFKKKIYARYSHVGRRNFLTYGYRASRIMHSNSIRKQLKPLWERLQKEINK

SEQ ID NO: 689 - protein, 436 aa, Vibrio cholerae
MEKMSVPLWYTKRNYLHFDVPVSGTKAEKIVTSTTSVARHAFFPFISYSFQLTKLDRDTSTGKLYRKPKPREVAYSSHIDSHIYAYYANQLSNLYEQKVEKSGLHESVLAFRKLDGKSNIHFADDAFNYIRKMKECSVIALDFSKFFNTLDHRILKEEWSKLLQVKHLPKDHYNVFRSLTKFSTVDRNELFKTFGISQYNQKANGRNRVCTPLEFREKVRGSGLIKPNPNGAMGIPQGSPISALLSNIYMFSFDKHMKNYVDSIGGKYFRYCDDMLLIVPSEYRDTVEKLANSKIAALKVQINSDKTEIRDFKFHNGQLLSFDEFGKQKPLQYLGFLFDGHSIFLRSTALARYSEKMKGGVKLAKKTMEKENRIRKSKGEPEQNQLYKRKLHRLYSYRGRRNFLSYGYRAAKIMNSKSIKRQLKPLWQRLQDEISK

SEQ ID NO: 690 - protein, 460 aa, Serratia marcescens
MDKDHFVKPGRCFSERPQFEIAPVSQFLRTHNMECREHPWFKKRGYLHFDEPISVEHALDIVTNPHAVATHSFLPFITFTSTTYKVQKDKGTNAINKTLKERPIAYSSHVDSHIYSYYAAILDEKYEKELYTHGISKSVLAFRKLNKSNIEFAHEAFQEIKKRGECSAVALDLSKFFDTLDHSFLKNAWCRLLATDRLPKDHYAVFKAITKFSKVDKNEVYDLIGIPKNNASNTKKTRKKICSFDDFRNKVRKENLIASNKAGFGIPQGSPISALLSNIYMLNFDIEMNNYVSSLGGVYFRYCDDMLFIVPSHEKNNVAGEAEKKLFKLKVSLNTKKTEIREFIAIPSKIKCDKPLQYLGFMFDGENIFLRSSSLSRYSDRMKRGVRLAKATMRRKNRIRKLKGLPKKELFKEKIYARYAHVGKRNFLTYGYRASRIMHSNSIRKQLKPLWERLQKEIHK

SEQ ID NO: 691 - protein, 325 aa, Aeromonas dhakensis
MATVLYLSGFCNLRLNMMNSENQWFRSRGYLHFDSPVKLRKACQIVKSPLNVAHHAFLPLISYDIHSFKISIDKDGNVQKKIKERPISYASHIDSHIYSYYAELLSNVYEKALHELQLKESVLAFRSLGKSNIDFANTAFEKIKAHGDCTAIAMDISGFFDNLDHVILKSMWCKLLQENSLPNDHFNIYRSLTKSSTVNRDLLYAALKISRNNPKSTGARLCDIKTFRDKIRGLGLIKTNSTGKGIPQGTSISALLSNIYMLDFDKKIKDIVVSISGEYYRYCDDMLFIIDSDKTSELISIVTKSISELKIEINDKKTEVRREFR

SEQ ID NO: 692 - protein, 164 aa, Aeromonas veronii
MATVLYLSGFCNLRLNMMNSENQWFRSRGYLHFDSPVKLRKACQIVKSPLNVAQHAFFPLIKYNIQSLKISIDKDGNVQKKIKTRPISYASHIDSHIYSYYAELLSDLYEKALSESQLEESVLAFRSLGKSANSTSKCDTRLCRLTVLFEYLDRLPESETFPRS

SEQ ID NO: 693 - protein, 449 aa, Proteus sp.
MAAYPLLLGFARVMMKKSELPSWYKKRNYLHFDEAISAKKASSIVTNKKIVASHAFFPFISYEFSLNKLDRDLATGCLYRKPKQREVAYSSHIDSHIYAYYSEKLSELYEEKLVKKGLDKSILAFRKLDGKSNIHFSNDAFNYIRSKGECTAVALDFSKFFDTLDHEILKQEWCNLLEEKFLPNDHYNVFKSLTKFTKVDRGLLFQEFSISPYTPKANGRCRVCSSQDFRTIVRKKGFIQSNPNGKAGIPQGSPISALLSNIYMLSFDEKMKNYVDSINGIYFRYCDDMLFIVPSSERNNVEMYAIKEIGSLVVKINNEKTEIRDFKYQNGKLCSYEDGKIKPLQYLGFLFDGNSIYLRSAALARYSEKMKGGVKLAKSTMNRKNKIRAKNGELEQTILYKRKLHRLYSYRGKRNFLSYGYRAATIMNSKSIKKQLKPLWARLKDEIDK

SEQ ID NO: 694 - protein, 449 aa, Proteus hauseri; identical to SEQ ID NO: 693

SEQ ID NO: 695 - protein, 421 aa, Pseudidiomarina donghaiensis; identical to SEQ ID NO: 346

SEQ ID NO: 696 - protein, 421 aa, Idiomarina loihiensis; identical to SEQ ID NO: 347

SEQ ID NO: 697 - protein, 427 aa, Aeromonas sp.
MATVLYLSGFCNLRLNMMNSENQWFRSRGYLHFDSPVKLRKACQIVKSPLNVAHHAFLPLISYDIHSFKISIDKDGNIQKKIKERPISYASHIDSHIYSYYAELLSNVYEKALHKLQLKDSVLAFRSLGKSNIDFANTAFEKIKAHGDCTAIAMDISGFFDNLDHVILKSMWCKLLQENSLPDDHFNIYCSLTKSSTVNRDLLYAALKISRNNPKSTGARLCDIKTFRDKIRGLGLIKTNSTGRGIPQGTSISALLSNIYMLDFDKKIKDMVVSISGEYYRYCDDMLFIIDSDKTSELISIVTQSISELKIEINDKKTEVRNFHVYSGVQKCDKPLQYLGFIFDGERKLIRSAALARFSGRMKAGVRLAKKTHQKANLIEEKNGVAKTPLFKKKIYERYSHLSKRNFITYGHKAANIMGSNAIKKQS

SEQ ID NO: 698 - protein, 426 aa, Pseudomonas otitidis; identical to SEQ ID NO: 350

SEQ ID NO: 699 - protein, 460 aa, Serratia marcescens
MDKDHFVKPGRCFSERPQFEIAPVSQFLRTHNMECREHPWFKKRGYLHFDEPISVEHALDIVTNPHAVATHSFLPFITFTSTTYKVQKDKGTNAINKTLKERPIAYSSHVDSHIYSYYAAILDEKYEKELYTLGISKSVLAFRKLNKSNIEFAHEAFQEIKKRGECSAVALDLSKFFDTLDHSFLKNAWCRLLATDRLPKDHYAVFKAITKFSKVDKNEVYDLIGIPKNNASNTKKTRKKICSFDDFRNKVRKENLIASNKAGFGIPQGSPISALLSNIYMLNFDIEMNNYVSSLGGVYFRYCDDMLFIVPSHEKNNVAGEAEKKLFKLKVSLNTKKTEIREFIAIPSKIKCDKPLQYLGFMFDGENIFLRSSSLSRYSDRMKRGVRLAKATMRRKNRIRKLKGLPKKELFKEKIYARYAHVGKRNFLTYGYRASRIMHSNSIRKQLKPLWERLQKEIHK

SEQ ID NO: 700 - protein, 460 aa, Serratia marcescens; identical to SEQ ID NO: 699

SEQ ID NO: 701 - protein, 371 aa, Neisseria dumasiana
MDLPWFKMRGYLHFDTPISLQKANELVSCPERVAKHSFYPFISCTLSVPKLKKNTQGKLTREPKKRVISYASHKDSHIFSYYAYILNDKYEHLLNNSYSSINNSVLAFRKLGQNNINFAQQAFNNIKQAKNCSVIALDISDFFGNLDHKILKQQWCKLLGTHTLPVDHFAVFKAITQYTTISKDILFKEFKISSHTPRSNNRKRICTPEEFRSFRKKHKLSLALPDQNLFIPNKNKGIPQGSPISALLSNIYMIDFDAFCHNKISELGGLYLRYCDDILCIVPTPRVDEIQHLVNQEIMKLKLKIHPTKTEIITFKYDDKKRKVLNDKKLQYLGFILKDESITIRPAAFTKYSKKMKRGVSLAKQTQRKYN

SEQ ID NO: 702 - protein, 435 aa, Neisseria dumasiana
MDLPWFKMRGYLHFDTPISLQKANELVSCPERVAKHSFYPFISCTLSVPKLKKNTQGKLTREPKKRVISYASHKDSHIFSYYAYILNDKYEHLLNNSYSSINNSVLAFRKLGQNNINFAQQAFNNIKQAKNCSVIALDISDFFGNLDHKILKQQWCKLLGTHTLPVDHFAVFKAITQYTTISKDILFKEFKISSHTPRSNNRKRICTPEEFRSFRKKHKLSLALPDQNLFIPNKNKGIPQGSPISALLSNIYMIDFDAFCHNKISELGGLYLRYCDDILCIVPTPRVDEIQHLVNQEIMKLKLKIHPTKTEIITFKYDDKKRKVLNDKKLQYLGFILKDESITIRPAAFTKYSKKMKRGVSLAKQTQRKYNIIRSKNALSGKRLFKKKLYSTYSHFGRRNFISYGRRAAEIMESPQIRKQLKPLWKRLQYRIETD

SEQ ID NO: 703 - protein, 435 aa, Neisseria dumasiana; identical to SEQ ID NO: 702

SEQ ID NO: 704 - protein, 434 aa, Neisseria sp.; identical to SEQ ID NO: 361

SEQ ID NO: 705 - protein, 127 aa, Pectobacterium colocasium
MESHEHPWFRKRGYLHFDKPISLEHALDIVTNPKTIATHSFLPFITFTSTTYKIQKDKGTNAINKTLKERPIAYSSHIDSHIYSYYAAALDELYENELRTHKITKNVLAFRALNKSNIEFAYEVFQK

SEQ ID NO: 706 - protein, 425 aa, Aeromonas jandaei
MMNSENQWFRSRGYLHFDSPVKLRKACQIVKSPLNVAQHAFFPLIKYNIKSLKISIDKDGNVQKKIKTRPISYASHIDSHIYSYYAELLSDLYEKALSESQLEESVLAFRSLGKSNIDFANIAFEKIKAHGDCTAIAMDISGFFDNLDHEILKSMWCKLLQEHSLPNDHFNIYRSLTKSSVVNRDLLYTALNISRNNPKAAGLRLCNIKTFREKVRGLGLIETNSTGRGIPQGTSISALLSNIYMLDFDKKIKDIVTSISGEYYRYCDDMLFIINSDKTSELISLVTQSISELKIEINDKKTEIRTFHTYRGVQKCDKPLQYLGFIFDGERKLLRSAALARFSGRMKAGVRLAKKTHQKANLIEEKNGVAKTPLFKKKIYERYSHLSKRNFITYGHKAANIMGSNAIKKQLKPLWGRLLKEMNEQ

SEQ ID NO: 707 - protein, 425 aa, Aeromonas aquatica
MMNSENKWFRSRGYLHFDSPVKLRKACQIVKSPLNIAQHAFFPLIKYDIQSLKISIDKDGNVLKKIKTRPISYASHIDSHIYSYYAELLSDLYEKALDKSQLQDSVLAFRTLGKSNIDFANIAFEKIKDHGNCTAIAMDISGFFDNLDHDILKSMWCKLLQKNSLPNDHFNIYRSLTKSSVVNRDLLYTALKISKNNPKAAGLRLCDIKTFREKVRGLELIKTNSTGRGIPQGTSISALLSNIYMLDFDKKIKDIVKSISGEYYRYCDDMLFIIDSDKTSELISLVTQHISELKIEINDKKTEVRTFHTYCGVQKCDKPLQYLGFIYDGERKLIRSAALARFSGRMKAGIRLAKKTHQKANLIEEKEGVAKTPLFKKKIYERYSHLSKRNFITYGHKAANIMGSNAIRKQLKPLWGRLIKEINEK

SEQ ID NO: 708 - protein, 428 aa, Providencia alcalifaciens
MKYPEHLWFRKRGYLHFDKPISLEHALNIVTNPYTVATHSFLPFITFTSSTYKIQKDKGTNSINKMLKERPIAYSSHIDSHIYSYYASILDELYENELQTYNITKNILAFRALNKSNIEFAHEAFQEIKKIGSCSAVALDLSKFFDTLNHNLLKDAWCKLLRKDKLPEDHYAVFKAITKYSKVDKEKLYDLMSIPKNNTKNTKKTRKQICSFVDFRNKVRKSNLIIPNKSALGIPQGSPISALLSNIYMLNFDIEINEYISSLGGKYFRYCDDMLFIVPTHEKNNIAGEAEKRLNKLKVHLNTKKTEIREFSFTSTKIKCDKPLQYLGFIFDGENIFLRSSSLSRYSDRMKRGVRLAKATMIRKNKIRKYKGLSTKELFKEKIYARYAHVGKRNFLTYGYRASRIMNSNSIRKQLKPLWERLQKEINK

SEQ ID NO: 709 - protein, 425 aa, Aeromonas caviae
MMNSENQWFRSRGYLHFDSPVKLRKACQIVKSPLNVAHHAFLPLISYDIHSFKISIDKDGNIQKKIKERPISYASHIDSHIYSYYAELLSNVYEKALHKLQLKDSVLAFRSLGKSNIDFANTAFEKIKAHGDCTAIAMDISGFFDNLDHVILKSMWCKLLQENSLPDDHFNIYCSLTKSSTVNRDLLYAALKISRNNPKSTGARLCDIKTFRDKIRGLGLIKTNSTGRGIPQGTSISALLSNIYMLDFDKKIKDMVVSISGEYYRYCDDMLFIIDSDKTSELISIVTQSISELKIEINDKKTEVRNFHVYSGVQKCDKPLQYLGFIFDGERKLIRSAALARFSGRMKAGVRLAKKTHQKANLIEEKNGVAKTPLFKKKIYERYSHLSKRNFITYGHKAANIMGSNAIKKQLKPLWGRLLKEINEQ

SEQ ID NO: 710 - protein, 425 aa, Ignatzschineria cameli
MKLESSDWYRNRGYLHFDQQVGIKAAQAIVTNPKKVARHSFYPMLRYCAFTIKLGKASEDASLVKNHKAREITYASHLDSHIYAYYGKVLELSYEEILSQLNLSDVVLAFRRLGKSNVDFAYEAFKEIESRKDCDVIALDITGFFDNLDHQHLKDAWAKLLHKEQLPEDHYAVYRSLTRYAYCIRDEIYKEFEISLNNPWYQRKKICSADEFRSRVRGKRYILINSTDRGIPQGTAISALLSNIFMLNFDKKLHSKMNDLGGSYRRYCDDMLFILPKSQQFDVESFVASEIEAYGLSINSKKTEKRLFREGISNKALQYLGFTYDGKRILLRSAALARFSEKMNKSIRLVKKTVAKESKKVGYKVPLRRKKLYERYSHLGRRNFITYGLRASKVMNSRAIRKQMKPLWDRLNQKLDEVDQSINDE

SEQ ID NO: 711 - protein, 425 aa, Ignatzschineria cameli; identical to SEQ ID NO: 710

SEQ ID NO: 712 - protein, 425 aa, Ignatzschineria indica
MKLKSSDWYRNRGYLHFDQQIGIKAARAIVTNPKKVARHSFYPMLRYCAFTIKLGKASEDASLVKTHKAREITYASHLDSHIYAYYGKVLELSYEQILSQLNLSDVVLAFRRLGKSNVDFAYEAFKEIESRKNCDVIALDITGFFDNLDHQHLKDAWAKLLHKDQLPEDHYAVYRSLTRYAYCIRDEIYREFEISLNNPWHQRKRICSAYEFRSRVREKEYISINNTDRGIPQGTAISALLSNIFMLNFDQKLHSKMNDLGGSYRRYCDDMLFILPKSQQFDVESFVASEIKAYGLSINSKKTEKRLFRDSKSNKALQYLGFTYDGKRILLRSAALARFSEKMNKSIRLVKNTVNKESKKMGYKVPLRRKKLYERYSHLGHRNFITYGLRASEVMNSKAIRKQIKPLWDRLNQKLDEVDQSIKDQ

SEQ ID NO: 713 - protein, 425 aa, Ignatzschineria indica; identical to SEQ ID NO: 712

SEQ ID NO: 714 - protein, 436 aa, Photobacterium damselae; identical to SEQ ID NO: 378

SEQ ID NO: 715 - protein, 427 aa, Chromobacterium amazonense; identical to SEQ ID NO: 383

SEQ ID NO: 716 - protein, 424 aa, Photorhabdus namnaonensis; identical to SEQ ID NO: 389

SEQ ID NO: 717 - protein, 428 aa, Providencia rustigianii; identical to SEQ ID NO: 390

SEQ ID NO: 718 - protein, 425 aa, Providencia alcalifaciens
MKYPEHLWFRKRGYLHFDKPISLEHALNIVTNPYTVATHSFLPFITFTSSTYKIQKDKGTNSINKMLKERPIAYSSHIDSHIYSYYASILYENELQTYNITKNILAFRALNKSNIEFAHEAFQEIKKIGSCSAVALDLSKFFDTLNHNLLKDAWCKLLRKDKLPEDHYAVFKAITKYSKVDKEKLYDLMSIPKNNTKNTKKTRKQICSFVDFRNKVRKSNLIIPNKSALGIPQGSPISALLSNIYMLNFDIEINEYISSLGGKYFRYCDDMLFIVPTHEKNNIAGEAEKRLNKLKVHLNTKKTEIREFSFTSTKIKCDKPLQYLGFIFDGENIFLRSSSLSRYSDRMKRGVRLAKATMIRKNKIRKYKGLSTKELFKEKIYARYAHVGKRNFLTYGYRASRIMNSNSIRKQLKPLWERLQKEINK

SEQ ID NO: 719 - protein, 425 aa, Providencia alcalifaciens; identical to SEQ ID NO: 718

SEQ ID NO: 720 - protein, 432 aa, Plesiomonas shigelloides; identical to SEQ ID NO: 392

SEQ ID NO: 721 - protein, 424 aa, Aeromonas hydrophila; identical to SEQ ID NO: 396

SEQ ID NO: 722 - protein, 424 aa, Aeromonas hydrophila
MLNSNDRWFRSRGYLHFDAPVKLRKARKIVSSPEHVSKHAFLPLISYSIESYKAHLNENGEIVKKRKPRPVSYASHIDSHIYSYYAEKLSELYEGVLVSSSLNDSVLAFRSLKKSNIDFANEAFENIKKHGNCTAIAMDITGFFDNLDHGILKSMWSKVLKVERLPSDHFNIFRSLTKSSTVQRDVLFEKLEISKNNPKKAGFRLCDIKKFREIVRGRDLIKTNKSSKGIPQGTSISALLSNIYMLDFDSEIKNIVTSMGGSYYRYCDDMLFIIDSEKRDTLIKTVTESISTLKIDINKDKTEIRNFYITHGIQKSDKPLQYLGFIFDGERKLIRSAALARFSGRMKAGVRLAKKAHSKANTIEEEKGVSQTPLFKKKIYERYSHLSKRNFITYGHMAAKKMNSKAIKKQLKPLWGRLVREIDK

SEQ ID NO: 723 - protein, 436 aa, Morganella morganii
MMKKSEYPSWYKKRNYLHFDEAINAKKATKIVVNKKAIASHAFFPFISYEFSTNKLDRDLVTGHLYRKPKQREVAYSSHIDSHIYSYYSEKLTELYECQLIKSGLSKSILAFRKLDGKSNIHFSNDAFNYIKGKGECTAVALDFSKFFDTLDHEILKQEWSKLLESQSLPSDHYNVFKSLTNFSKVDRDILFKEFGISQYTPKANGRSRICSSQEFRSIVRYKNFIRKNPNNKAGIPQGSPISALLSNIYMFSFDKKMKNYVDSINGIYFRYCDDMLFIVPSSERDVVEKYAIEEIKSLKVTINNKKTEIRDFRYQNGKLCSFDSGKAKPLQYLGFLFDGNAVYLRSAALARYSEKMKGGVKLAKNTMNRKNKIRIKNGETEQTILYKRKLHRLYSYRGKRNFLSYGYRAAKIMNSKSIKKQLKPLWIRLMDEINK

SEQ ID NO: 724 - protein, 65 aa, Aeromonas caviae
MMNSENQWFRSRGYLHFDSPVKLRKACQIVKSPLNVAHHAFLPLISYDIHSFKISIDKDGNVQKK

SEQ ID NO: 725 - protein, 425 aa, Aeromonas dhakensis
MMNSENQWFRSRGYLHFDSPVKLRKACQIVKSPLNVAHHAFLPLISYDIHSFKISIDKDGNVQKKIKERPISYASHIDSHIYSYYAELLSNVYEKALHELQLKESVLAFRSLGKSNIDFANTAFEKINAHGDCTAIAMDISGFFDNLDHVILKSMWCKLLQENSLPNDHFNIYRSLTKSSTVNRDLLYAALKISRNNPKSTGARLCDIKTFRDKIRGLGLIKTNSTGKGIPQGTSISALLSNIYMLDFDKKIKDIVVSISGEYYRYCDDMLFIIDSDKTSELISIVTKSISELKIEINDKKTEVRNFHVYSGVQKCDKPLQYLGFIFDGERKLIRSAALARFSGRMKAGVRLAKKTHQKANLIEEKNGVAKTPLFKKKIYERYSHLSKRNFITYGHKAANIMGSNAIKKQLKPLWGRLLKEMNEQ

SEQ ID NO: 726 - protein, 425 aa, Aeromonas dhakensis; identical to SEQ ID NO: 725

SEQ ID NO: 727 - protein, 355 aa, Aeromonas veronii
MMNSENQWFRSRGYLHFDSPVKLRKACQIVKSPLNVAQHAFFPLIKYNIQSLKISIDKDGNVQKKIKTRPISYASHIDSHIYSYYAGLLSDLYEKALSESQLEESVLAFRSLGKSNIDFANIAFEKIKAHGDCTAIAMDISGFFDNLDHEILKSMWCKLLQEHSLPNDHFNIYRSLTKSSVVNRDLLYTALKISRNNPKAAGLRLCNIKTFREKVRGLGLIETNSTGRGIPQGTSISALLSNIYMLDFDKKIKDIVTSISGEYYRYCDDMLFIIDSDKTRELISLVTQSISELKIEINDKKTEIRTFHTCRGVQKCDKPLQYLGFIFDGERKLLRSAALARFSGSPRCQNSCRLI

SEQ ID NO: 728 - protein, 440 aa, Neisseria zalophi; identical to SEQ ID NO: 399

SEQ ID NO: 729 - protein, 247 aa, Aeromonas hydrophila; identical to SEQ ID NO: 461

SEQ ID NO: 730 - protein, 473 aa, Aureimonas sp.; identical to SEQ ID NO: 19

SEQ ID NO: 731 - protein, 446 aa, Albimonas donghaensis; identical to SEQ ID NO: 21

SEQ ID NO: 732 - protein, 479 aa, Inquilinus limosus; identical to SEQ ID NO: 25

SEQ ID NO: 733 - protein, 461 aa, Brevundimonas sp.; identical to SEQ ID NO: 36

SEQ ID NO: 734 - protein, 397 aa, Roseobacter sp.; identical to SEQ ID NO: 38

SEQ ID NO: 735 - protein, 395 aa, Pseudoxanthomonas composti
MNSKKCEQLVSDPVAVSRHAFFPFLRLDIVRPRIKRLATGKLQKSNKVRDIRYAAHADAAIYAYYNYVLAELYEQKLSIAGLQEEVIAFRPLGKSNVNFAKEAFDWVASNAPCTALGFDVKDFFGSLDHAFLKSAWAELLGKATLPKDHYAVYRSLTRHASVELIAARKALGISRSALEKRERICEAAEFRSAIRGAGLVHVNSSGRGIPQGSPMSALLSNIYMLAFDKEMSKAARYVGGYYRRYCDDILVIVKAEHVTDFKKFVEDKLANLRLTMQAAKTLECAFTPLADKPLQYLGLVFDGKRILLRSSGVARYYKKMRAGVRQHTKAKTMDGETPLAVQRQKRLLRQYTEHAPEFQRSYPSYVKRVSIAAGSPAIIQQLRRHRRCFKKLMEE

SEQ ID NO: 736 - protein, 460 aa, Priestia taiwanensis; identical to SEQ ID NO: 40

SEQ ID NO: 737 - protein, 457 aa, Bacillus thuringiensis
MKGEYACKGFFNRVIGYDYLPLLALPNMNKKKYGIKRYKHFDKKKSIEKVKDKIQDPQWVAKHGFYPFIHFEIKFQKYSRKEKQAKEKVRKIFYASHIDSYIYKYYGDRLNNNYNCIVDELGISDVATAYRNNLSGKSNIDFAKEVIDFIKSQKAAYIFVADFTNFFDTLDHKYLKDKIRHVLKADTLPNDYYNVFKNITRFSYFFKDAIEMDLETKYTESEIKSSYKYFTEEEFRNFKHKNIYRNTKGYGIPQGAGISSVCSNIYLLDFDEKIQNYVNEQNGIYRRYCDDLIIVIPIEGGFKDYDYKIPQTMVENIKIQIPNLEIQPEKTGNYFYINNKIIDLEFKNTKLDYLGFSFNGEEVRIREKSLFKYYTRMYRKIRICNRKSKEFGRKSYRKALYRNYSHLGKKKKGHGNFLSYASRAQAIFDEESSTLNLMEAQVKKHWKNINARLKDPE

SEQ ID NO: 738 - protein, 430 aa, Rhizobium sp.; identical to SEQ ID NO: 76

SEQ ID NO: 739 - protein, 421 aa, Stenotrophomonas maltophilia; identical to SEQ ID NO: 82

SEQ ID NO: 740 - protein, 480 aa, Devosia sp.; identical to SEQ ID NO: 87

SEQ ID NO: 741 - protein, 478 aa, Rhizobium sp.
MKAWTASVRRYPHFDPVISVAEAEALATDPARVATHTFYPFLKYDEGWTVYAKKGRHGKRKDRPIRFAARLDSCIFSYYRHILSVPYEARLQTEGLSDSVVAYRRISKPGGSGGQSNIDFALSAVEAIQSQGNCCAIALDISSFFETLDHGRLRDVWAELLGVSRLPADHFKVYQTITRYPFVDIIKAYTRLGFYGDKTDRNGKVRPGFLKARSEIPVQLCDGRTFQAKIARSATQSSIIEVNKLCIGVPQGAPLSDLLANAYLLEFDKYLRDICINFGGRFFRYSDDILVIAPILEADAIVLEKEIRSAITTYGKGLLIKEEKSAIHRFEVEGERQEVRTIKASDKDGRPMPNKPFEYLGFRYDGRHVFIRDKTMSNLHRKIASVCRATAIRQVKRYQGKLTHDILALTDIEKLIQAFGSVEDFHMKAADYRSWTFTTYAKRASKTMGALGKPIARQIKNLRSAIHRRLEYELTRAQ

SEQ ID NO: 742 - protein, 457 aa, Bacillus pacificus
MKGEYACKGFLKRVIGYDYIPLLALPDMDKKKYSIKRYKHLDKKKSIEKVKDKIQDPQWVAKHGFYPFIHFEIKFQKYSRKEKQAKEKVRKIFYASHIDSYIYKYYGDKLNNHYNCIADELGISDIATAYRNNLSGKSNIDFSKEVIDFIKSQKAAYIFVADFTNFFDTLDHKYLKNKIRQVLKEDTLPDDYYNVFKNITRFSYFFKDAIEMDLETKYTESEIKGSYKYFTEEEFRDFKHKNIYRNTKGYGIPQGAGISSVCSNIYLLDFDKEIQNYINEQNGIYRRYCDDLIIVIPIEGEFKDYDYTIPQKIVENIKMKIPNLKIQPEKTGNYFYTNDKIIDLEFKNTKLDYLGFSFNGEEVRIREKSLFKYYTRMYRKIRMCNRKSKEFGRKSYRKALYRNYSHLGKKKKGYGNFLSYASKAQEIFDKESSTVNLMETQVKKHWKNINARLEDPE

SEQ ID NO: 743 - protein, 457 aa, Bacillus cereus group sp.; identical to SEQ ID NO: 742

SEQ ID NO: 744 - protein, 462 aa, Lysinibacillus fusiformis; identical to SEQ ID NO: 111

SEQ ID NO: 745 - protein, 491 aa, Brucella tritici; identical to SEQ ID NO: 118

SEQ ID NO: 746 - protein, 492 aa, Rhizobium lentis
MPDGVFASSHTEYDAGQSEEHWVPRDKDIKTYIHFDRNVSPHQLARIANSPTEVAKNPFLPLLLFHEEWAKFRRDGARTRKSRPIRFASRRDAAIFARYRAKLSPLYERQLRKRGIEDVPVAYRRLPKAGGGNKCNIEIARDIFSFIKQCDGCYVTVVDIKSYFESLEHSRIKAVWEMLIGRDLPPDHLAVFRAVTKYSVVDIDLLFNRLQMYKKGDGANRTEKRKRKIDVLRTSGFKQICEPTEFRSIVSGKGAGQASLIQNNGFDFGIPQGTPLSDLIANFYLIEFDEEMNSWSKALGGLYRRYSDDIVIILPTGGAPDPMAAKERLQSAIKNYGKQLRIQDKKVAVCEFSSAQTGLSFAHLYGKASRNGLEYLGFEFDGQTLSNAWRKLKMRAYGDAWRFVKRYRAKGKGWLIANYNRRKIETKLLRDVTFNQDIGYETWTFSKYVNRASKAFIGYKPIFSLQTQRYRRHAKFVIAKSFDKALRRHYSL

SEQ ID NO: 747 - protein, 491 aa, Brucella intermedia; identical to SEQ ID NO: 131

SEQ ID NO: 748 - protein, 490 aa, Rhodobacter capsulatus; identical to SEQ ID NO: 133

SEQ ID NO: 749 - protein, 482 aa, Agrobacterium tumefaciens
MRAIVKAWTASVRRYPHFDPVIDAAEAEAIATDPARVVTHTFYPFLKYDEGWTQFAEKGKHGKRKDRPIRFAARLDSCIFSYYRYLLSAPYEAILQAERLSSSVIAYRRIPKSSGSGGQSNIDFALSAVQAIQTQGNCCTIALDISSFFETLDHNRLQSVWADLLEVSKLPADHFTVYRAITRYAFVDVVKAYTRLGYYGDKSDRNGKVKPGYLKARKDIPVQLCDGRTFREKIARSATQTSIIEVNKLGMGVPQGAPLSDLLANAYLLEFDKYLRDTCDELGGCFFRYSDDILVIAPISETDAVQLEKEIRGAIATYGKGLLIKEEKSAIHRFDVQGDGQAVRTIKATDKDGKQMQNKPFEYLGFRYDGRCAYIRDKTMSNLHRKIASVCRATAIRQVKRYRGKPINDIMALTNVEKVIQAFGSVEDFHLKAADYRSWTFTTYAKRASKTMGALGMPIARQIGKLRAAIRRRLESELIRAL

SEQ ID NO: 750 - protein, 482 aa, Agrobacterium tumefaciens
MRAIVKAWTASVRRYPHFDPVIDAAEAEAIATNPARVVTHTFYPFLKYDEGWTQFAEKGKHGKRKDRPIRFAARLDSCIFSYYRYLLSAPYEAILQAERLSSSVIAYRRIPKPSGSGGQSNIDFALSAVQAIQTQGNCCTIALDISSFFETLDHNRLRSVWADLLGVSKLPADHFTVYRAITRYAFVDVVKAYTRLGYYGDKSDRNGKVKPGYLKARKDIPVQLCDGRTFREKIARSATQTSIIEVNKLGMGVPQGAPLSDLLANAYLLEFDKYLRDTCDELGGCFFRYSDDILVIAPISETDAVQLEKEIRGAIATYGRGLLIKEEKSAIHRFDVQGDRQAVRTIKATDKDGKQMQNKPFEYLGFRYDGRCAYIRDKTMSNLHRKIASVCRATAIRQVKRYQGKPINDIMALTNVEKVIQAFGSVEDFHLKAADYRSWTFTTYAKRASKTMGALGMPIARQIGKLRAAIRRRLESELIRAL

SEQ ID NO: 751 - protein, 437 aa, Sulfitobacter sabulilitoris; identical to SEQ ID NO: 152

SEQ ID NO: 752 - protein, 452 aa, Brucella endophytica
MTDPTRVAKHTFYPFLKYDEGWTVYAEKGKHGKRKDRPIRFAARLDSCIFSYYRHLLSVPYEARLQAEGLSDSVIAYRRIPKNKGGGGKSNIDFALSAVEAIQSQGNCCTIALDISSFFETLNHERLREVWTELLGVPRLRDDHFKVYRAITRYAQVDVVKAYTRLGLYGDKTDRNGKVRPGYLKAKSEIPVQLCDGRTFQAKIARSATQPSIIEVNKLDVGVPQGAPLSDLLANAYLLEFDKYLRDICSKFSGRFFRYSDDILVITPIPEVDALELEKEIRNAITTYGKGLLIKEEKSAIHRFEVGGSRQTVRTIKASDKDGKTMPNKPFEYLGFRYDGRHVFIRDKTMSNLHRKIASVCRVTAIRQVKRYQGKTIHDILALTDIEKLIQAFGSVEDFHLKAGDYRSWTFTTYAKRASKTMGALGKPIARQIKNLRSAIRRRLEYELTRAR

SEQ ID NO: 753 - protein, 488 aa, Rhizobium glycinendophyticum; identical to SEQ ID NO: 155

SEQ ID NO: 754 - protein, 500 aa, Rhizobium ruizarguesonis; identical to SEQ ID NO: 156

SEQ ID NO: 755 - protein, 454 aa, Flavonifractor sp.; identical to SEQ ID NO: 159

SEQ ID NO: 756 - protein, 525 aa, Hansschlegelia plantiphila; identical to SEQ ID NO: 166

SEQ ID NO: 757 - protein, 446 aa, Mitsuokella multacida
MYPTKRYPHFDKVIRFSDVKSYVCDPRKVAKHSFFPLIHYIKVSKRYSPKLINEAEKDAHRQHIKKKERDIMYAAHLDGYIYRYYADRLNQKYDEMAMDHHIDAVAIAYRDNKKGNSNIQFAREVFDFIAAHPHCYIRVGDFEHFFDRLNHMYLKKQVKDVLQTESLPQDWYKVLHSVMRYTCVDRKIVAPFYDKRSKRYFRSIKDYRKFRQSRRDAFRVNQAGVGIPQGTALSGVLANVYMIAIDEKIQQFVQSYGGLYRRYSDDTIIVIPLDEGPSVDLKALDDMLQEWIHEAYLSEQLDKTKCFFYRDSVLYDASKQDDSCACARVHAMDYLGFTFDGKEVKVRQKGIYKFERKASTAIHHARAIKRKYHLEKLPFRASILRYYFPNGYKKNQSGRRNRQSNFLGYLDRVDSEFQDRRVSCKSEKQVVKLNRKIKNAYDRASE

SEQ ID NO: 758 - protein, 465 aa, Lysinibacillus fusiformis; identical to SEQ ID NO: 185

SEQ ID NO: 759 - protein, 460 aa, Bacillus inaquosorum
MVYNSKGEYASRVFDRVIGYDYIPLLALPNMNEKKYRVKGYKHLDNKKSIEKVKGKIQNPRWVAKHGFYPFMHFEIKFQKYSRKEKKPKEKVRKIFYASHMDSYIYKYYGDKLNNHYNSVVDKLGINEVATAYRNNLSGKSNINFAKEVIDFIKVQQSAYIFVADFTNFFDTLDHRYLKEKIRYVLKKDTLPDDYYNVFKNITRFSYFIKDTIESELKNKYTESEIKNSYKYFTEEEFRSFKHKNIYKNSKSYGIPQGAGISSVCSNIYLLDFDEKLQKYVKGQKGLYRRYCDDLIIVIPIEGDVQDYNYKIHQKIMDDIKEQIPNLEIQPEKTGNYFYTDNQITDLDFNETKLDYLGFSFNGKEVRIREKSLFKYYTRTYRKVRICNRKSKKFGRKSYRRELYKNYSHLGKSKKGHGNFISYVERAQKIFDEDSKTINLMETQVKKHWKNIQSRLEQPE

SEQ ID NO: 760 - protein, 465 aa, Lysinibacillus sp.; identical to SEQ ID NO: 190

SEQ ID NO: 761 - protein, 434 aa, Clostridium sp.; identical to SEQ ID NO: 196

SEQ ID NO: 762 - protein, 475 aa, Devosia elaeis; identical to SEQ ID NO: 197

SEQ ID NO: 763 - protein, 465 aa, Lysinibacillus sp.; identical to SEQ ID NO: 199

SEQ ID NO: 764 - protein, 481 aa, Paracoccus sediminis; identical to SEQ ID NO: 201

SEQ ID NO: 765 - protein, 490 aa, Paracoccus sediminis
MLRLHLGPPMTTFDFSSSDLKNYPHFDSPISLREIRKLVTCKTRVASNTFFPFMRYEEGWQPYREKGAAKPDRKSRPIRYGARRDAYIFTHYRRQLSKLYEERLVTLGISDCPIAYRKIRKPGQSGGKCNIDFAKDAFNEIDRIGNCVAIALDISKFFEHLDHARIKEIWCDLLGVARLPEDHFAVFKNVTDYRFVDQREVYRRLGFFGPKVVNGKSIEGFLQPFEDIPKKLCTMQEFRQKICGYGGVYTSLIQKNQGCYGIPQGSPISDLIANFYLIDFDLSLANYARSLGGCYMRYSDDILLILPGGEAAASAAADFAVQEITKQGNKLRIKNEKTCIVQYERDGQKLRFKHLSGPQGSGGLEYLGFRYDGRKVYIRESTVSRLYRKISSAINQAAHRHAEKNPSLPAADLIKTDSLLLSRFMRQKKEKLTDDHRTWTFYSYILRASSVFGVKGDRIFKQVDSFEAIMRRRVAAALVRAVSRRKPTAP

SEQ ID NO: 766 - protein, 491 aa, Minwuia thermotolerans; identical to SEQ ID NO: 203

SEQ ID NO: 767 - protein, 261 aa, Blautia sp.; identical to SEQ ID NO: 210

SEQ ID NO: 768 - protein, 431 aa, Cytobacillus solani; identical to SEQ ID NO: 220

SEQ ID NO: 769 - protein, 247 aa, Bradyrhizobium daqingense; identical to SEQ ID NO: 221

SEQ ID NO: 770 - protein, 496 aa, Ruegeria sp.
MEPIFSPKDLKHYPHFDRRLSIKEAEEIVSDPARVAANKFYPFFLYEETWQPFRIAEKERPEPKSRPIRYAARRDAYILTHYRRILAERYEERLSNLGVEHCPIAYRKIPKGGGGGKCNIDFAKDAFDEIEKQGDCVAIALDIKGYFENLDHERIKAVWCDLLAVDRLPPDHFTVFKNVTRYHVVDQKDVYRRLGYIETVSVNGYPRERYTVPFKKMPTQLCSPADFRAKICGGDPTIPSLVRRNADEEGNLLNHGVPQGAPISDLIANFYLLGFDVAMNQYAESRGGRYMRYSDDILLIVPGGETEADEAEAFAVGEIRKYGEELQIKEAKTCIVRFLRDNDALAFQHVRGPQGKNGFEYLGFRFDGRQVYVRDSTISRLYRKVALSAKGVARGFAKAHPKMNASEILATFNYSDFSQRFSRVHPEELSPDDYGTWTFYSYLKRASETFGARGAPILPQARNFKAIMKQRIAEAMVRAVVQRDKAAAAATEAEAE

SEQ ID NO: 771 - protein, 430 aa, Paenalkalicoccus suaedae
MNKNKYRVKGYKHLDNKKSIEKVKGKIQNPRWVAEHGFYPFMHFEIKFQKYNRKEKQPKEKVRKIFYASHIDSFIYKYYGDKLNNHYNSVVDKLGINEVATAYRNNFSGKSNINFAKEVIDFIKVQKSAYIFVADFTNFFDTLDHRYLKEKIRYVLNKDTLPDDYYNVFKNITRFSYFIKDTIEEELKTKYTESEIKNNYKYFTEEEFRAFKHKNIYKNSKSYGIPQGAGISSVCSNIYLLDFDKKIEKYVRKQKGLYRRYCDDLIIVIPIEGEVQDYNYQMHQKIVDDIKKQIPNLKIQPEKTGNYFYSDNLITDLEFNETKLDYLGFSFNGKEVRIREKSLFKYYTRTYRKVRICNRKSKEFGRKSYRRELYKNYSHLGKSKKGHGNFLSYAERAQKIFDEDSKTLNLMETQVKKHWKNIQSRLDQPE

SEQ ID NO: 772 - protein, 469 aa, Polymorphobacter sp.; identical to SEQ ID NO: 244

SEQ ID NO: 773 - protein, 430 aa, Bacillus atrophaeus; identical to SEQ ID NO: 245

SEQ ID NO: 774 - protein, 467 aa, Acinetobacter baumannii; identical to SEQ ID NO: 255

SEQ ID NO: 775 - protein, 467 aa, Acinetobacter baumannii
MLSFNQYQEEIYLKKHQLKASNNSKLKSRVHFDTPLDAHSAFALVSNPEKVSKHWFLPFIGFDQSVRKIRKHNGLTRRISKVRPLRYAANRDGYIYAYYSYLLDKQYENLIKETSLNSSVLAYRSLGKSNVDFAKEVFDWIAQSQGCNVLTIDLSSFFDTLDHEILKKQWQKVNNVERLSQDHYMVFKSLTNYSFMNMEDVLFALGWSDKFNRKRLGEKIPSPLRKKTSAPYQSLDDFRDIRKFRFSGPNGSFKYLVQTPEKIDGKRYGIPQGSPMSAILSNIYMLDFDHYCSELMKEIGGLYKRYCDDIIVLFPEIIKIDDIYKSLEKALHEYGGTQLKINPSKVEKIKFINKNGNLTAIDAVTNNYKPLQYLGFIYDGQKVLIRSSSLSNYYRRLISKIRSSKNKALQNNSRPYRRKIYRMYSHLARKQRNFITYAYKASATMEDNLIKRQLSNHWQRIHKELNK

SEQ ID NO: 776 - protein, 467 aa, Acinetobacter baumannii; identical to SEQ ID NO: 775

SEQ ID NO: 777 - protein, 533 aa, Allomuricauda eckloniae; identical to SEQ ID NO: 260

SEQ ID NO: 778 - protein, 467 aa, Acinetobacter pittii; identical to SEQ ID NO: 265

SEQ ID NO: 779 - protein, 489 aa, Altererythrobacter sp.; identical to SEQ ID NO: 267

SEQ ID NO: 780 - protein, 466 aa, Acinetobacter haemolyticus; identical to SEQ ID NO: 272

SEQ ID NO: 781 - protein, 488 aa, Altericroceibacterium spongiae; identical to SEQ ID NO: 275

SEQ ID NO: 782 - protein, 486 aa, Azospirillum brasilense; identical to SEQ ID NO: 278

SEQ ID NO: 783 - protein, 390 aa, Oceanobacillus sp.; identical to SEQ ID NO: 287

SEQ ID NO: 784 - protein, 266 aa, Rhizobium anhuiense; identical to SEQ ID NO: 293

SEQ ID NO: 785 - protein, 430 aa, Bacillus inaquosorum
MNEKKYRVKGYKHLDNKKSIEKVKGKIQNPRWVAKHGFYPFMHFEIKFQKYSRKEKKPKEKVRKIFYASHMDSYIYKYYGDKLNNHYNSVVDKLGINEVATAYRNNLSGKSNINFAKEVIDFIKVQQSAYIFVADFTNFFDTLDHRYLKEKIRYVLKKDTLPDDYYNVFKNITRFSYFIKDTIESELKNKYTESEIKNSYKYFTEEEFRSFKHKNIYKNSKSYGIPQGAGISSVCSNIYLLDFDEKLQKYVKEQKGLYRRYCDDLIIVIPIEGDVQDYNYKIHQKIMDDIKEQIPNLEIQPEKTGNYFYTDNQITDLDFNETKLDYLGFSFNGKEVRIREKSLFKYYTRTYRKVRICNRKSKKFGRKSYRRELYKNYSHLGKSKKGHGNFISYVERAQKIFDEDSKTINLMETQVKKHWKNIQSRLEQPE

SEQ ID NO: 786 - protein, 430 aa, Bacillus inaquosorum; identical to SEQ ID NO: 785

SEQ ID NO: 787 - protein, 451 aa, Alkalihalobacillus pseudalcaliphilus
MQGFFDRVIGYDYIPLLALPNMNKKKYRVKGYKHLDNKKSIDKVKSKIQNPRWVAKHGFYPFMHFEIKFQKYSRKEKQPKEKVRKIFYASHIDSFIYKYYGDKLNDHYNSVVNELGINEVATAYRNNLSGKSNINFAKEVIDFIKVQKSAYIFVADFTNFFDTLDHRYLKEKIRYVLKKDTLPDDYYNVFKNITRFSYFIKDTIEAELKTKYTESEIKNSYKYFTEEEFRAFKHKNIYRNSKSYGIPQGAGISSVCSNIYLLDFDKKIEKYVKEQKGLYRRYCDDLIIVIPIEGEVQDYNYQIHQKFVVDIKEQIPNLEIQPEKTGNYFYYDNQITDLEFNETKLDYLGFGFNGKEVRIREKSLFKYYTRTYRKVRICNRKSKEFGRKSYRRELYKNYSHLGKSKKGHGNFISYAERAQKIFDEDSNTINLMETQVKKHWKNIQSRLDKPE

SEQ ID NO: 788 - protein, 342 aa, Gluconobacter morbifer; identical to SEQ ID NO: 294

SEQ ID NO: 789 - protein, 442 aa, Lactobacillus intestinalis; identical to SEQ ID NO: 296

SEQ ID NO: 790 - protein, 456 aa, Pseudovibrio sp.
MRPFQSAIYKASYLTQKKFFPLMHYVNEWQPYRTGSRSKPDKKSRNIRYAARRDAYIYAHYRKILIIKYEERLKQLGISDCPIAYRRIMKTGNAGKCNIDFAKEAFDRIDEIGDCVAIALDIRKFFENLNHAQIKEIWSDLLDVDYLPRDHFAVFKNLTQYRYVDQNEVYTRLGYIEKSIINGTARYKRAEKFKDYKDIPKQLCSPTDFRSKIAGQGAGFTSLISKNTLKVGIPQGTPISDLVANFYLLSFDKAMYSFAKEKNGYYYRYSDDILLILPGARDEAEEARIFALNAITEHGQSLEIKDAKTCIVKYERNRTGLSYEHLGGPQGKNGFEYLGFRFDGTNIYLRDATISRLFRKASATCRREAIRIIKNNPTIDKVALVEKFNISHVCKRYLKVESRELQLDDVKSWSFWTYVKRANQILGRKSDVIPKQINGFKTFLKDRVEAAVYKKK

SEQ ID NO: 791 - protein, 476 aa, Bradyrhizobium sp.; identical to SEQ ID NO: 309

SEQ ID NO: 792 - protein, 459 aa, Lysinibacillus sphaericus; identical to SEQ ID NO: 316

SEQ ID NO: 793 - protein, 431 aa, Sphingomonas sp.; identical to SEQ ID NO: 319

SEQ ID NO: 794 - protein, 488 aa, Rhizobium ruizarguesonis
MTIRAHGHLAPSRSSALDGWAFRPKMYPHFDSFLTETEARALASDPARVAAHSFYPFILYHQRWTKFTAKGTKGKVKERPIRFAARADAYIFSYYRHLLSAPFEARLKELDLGDSVLAYRRIANPGGGGKCNIHFALDAVNAIRKLGNCSAIALDISSFFESLDHEMLRARWCDLLKVSRLPPDHYAVFKAMTRYSVIDREGLYERLGFWGQKHVSRDGVPIKGFLVDESAIPLQLCNGTDFRQKIAGGNGLRSLIEVHRKPYGIPQGSPISDLLANFYLMQFDKVVATRVRELGGAYFRYSDDILIVAPIEADAAVDLEAWVRQEIVCHGPKLQIKAEKSAIFRYWGTGGDQTWIRIAGEQGKNGIEYLGFRYDGNSMFLRDSTLSGLQRKAASSAMRLALSLVQRYPGKSSSDILTDVNLSTFLQRYGRVHDFESKADNVKNWTFWTYATKAASITAPLGLPIFKQLRNYRRNMRNHVKRALEKKA

SEQ ID NO: 795 - protein, 488 aa, Rhizobium ruizarguesonis; identical to SEQ ID NO: 794

SEQ ID NO: 796 - protein, 461 aa, Mesorhizobium composti
MSVKDAVLLATDPVRVARHPFYPFIRYHQRWTKYAEKGQSGKEKIRPIRYAARADAYIFSYYRYLLSRDYEARLQNENLTENVLAYRRILDSSGSGKCNIHFAMDGIKKIRNLGRCCAIAMDISNFFESIDHGVLKEAWKDVIGGSRLPPDHYAVYKAITAYSVVDKEKLYERLGYYGVKGHNKTGDPIKGYLKPPRDIPTKLTTGAEFRRAVAGGNGYRSLIDQNRKPFGVPQGAPISDLLANLYLLKFDMEVRDRVAALGGAYYRYSDDILIVTPQEPNEASDLEAWVRNTIRKYGDKIKIKPEKSALFHFQPSGDNQLWTRVSGDQGKNGLEYLGFRYDGRYMYLRDSTISNFLRKVTRGAKRAAHFAARRYPNKSAVQIFDLFDVDGFIQRYGRVEDFESKAGDVHNWTFWTYVTHAADVCGPLGRPIFKQLRHQRGAISGRIMGAIVNAVKWRDRA

SEQ ID NO: 797 - protein, 500 aa, Rhizobium laguerreae
MTIRAHGHLAPSRSSALDGWAFRPKMYPHFDSFLTETEARALASDPARVAAHSFYPFILYHQRWTKFTAKGTKGKVKERPIRFAARADAYIFSYYRHLLSAPFEARLKELDLGDSVLAYRRIANPGGGGKCNIHFALDAVNAIRKLGNCSAIALDISSFFESLDHEMLRARWCDLLKVSRLPPDHYAVFKAMTRYSVIDREGLYERLGFWGQKHVSRDGVPIKGFLVDESAIPLQLCNGTDFRQKIAGGNGLRSLIEVHRKPYGIPQGSPISDLLANFYLMQFDKVVATRVRELGGAYFRYSDDILIVAPIEADAAVDLEAWVRQEIVCHGPKLQIKAEKSAIFRYWGTGGDQIWTRIAGEQGKNGIEYLGFRYDGNSMFLRDSTLSGLQRKAASSAMRLALSLVQRYPGKSSSDILTDVNLSTFLQRYGRVHDFESKADNVKNWTFWTYATKAASITAPLGLPIFKQLRNYRRNMRNHVKRALEKKGLARGPNPRVFTS

SEQ ID NO: 798 - protein, 447 aa, Sinorhizobium saheli
MAADPTRVASHAFFPFLRYHQRWTKFTDKGEKGDVKERPIRFASRADSYIFSYYRHLLSQPFEKELKERGLDGSVLAYRRVIGANGRGQCNIHFALEAISAIRALGNCCAIALDISSFFESLDHGRLKAIWCGLLGTDRLPADHYRVFQAITAYSVVDREELFERLGYIGPKYMSKTGEPINGYLVEKSLIPRRLCTGQEFREKIAGGDGQKSLIKKHRKPYGIPQGSPISDLLANFYLLDFDTAVKAKVDGMGGRYFRYSDDILIVVPVDRVAAVELEEWVRSQIVLHGPKLRIKAEKSAIFCYEGSGGDQSWSRIMGEQGKNGLEYLGFRYDGRNMFLRDSTLSGLQRKAAASAKRVALGLLRRYPEKSTDQIIAEFNVSAFLQRYGRVQDFESKADDVRNWTFWTYATRAAKITAPLGLPIYRQLRNYRRNMRAHLKRALEKGR

SEQ ID NO: 799 - protein, 447 aa, Sinorhizobium saheli; identical to SEQ ID NO: 798

SEQ ID NO: 800 - protein, 492 aa, Albimonas pacifica; identical to SEQ ID NO: 349

SEQ ID NO: 801 - protein, 386 aa, Novacetimonas cocois
MDISSCPIAYRKIKRPDGRGKCNIDFAKDAFDTIDFLGNCVAICLDIKGYFESLDHLQIKQIWCDLLGVTKLPADHYAVFKNITQYHYVDQKNVYTRLGYWGVLDPSKPLVEGPLKSIPIQICTPKEFREKICGLDGKSGPSLIEKNSYNYGIPQGAPISDIIANFYLLYFDKKINDYVRSQGGKYLRYSDDILIILPKNSLNLKYTIDFVSDELAKNGKNVSIKKEKTSIVEFFLNNGLRSNKTIAYDGFINNKDGLEYLGFRYDGNNVYVREGTVSRFYRKISIGAKKYSREYVKDNPKKDIPTLINDFNFSIFYQKYGKVNKKYYIENDYKSWTFYSYIKRSCDIFEEKGKIIRKQFSNFQKFVKKKVSNAIVKSWNKKNNFP

SEQ ID NO: 802 - protein, 430 aa, Bacillus cereus; identical to SEQ ID NO: 356

SEQ ID NO: 803 - protein, 430 aa, Bacillus cereus
MDKKKYSIKRYKHLDKKKSIEKVKDKIQDPQWVAKHGFYPFIHFEIKFQKYSRKEKQAKEKVRKIFYASHIDSYIYKYYGDELNNHYNCIADELGISDIATAYRNNLSGKSNIDFSKEVIDFIKSQKAAYIFVADFTNFFDTLDHKYLKNKIRQVLKEDTLPDDYYNVFKNITRFSYFFKDAIEMDLETKYTESEIKGSYKYFTEEEFRDFKHKNIYRNTKGYGIPQGAGISSVCSNIYLLDFDKEIQNYINEQNGIYRRYCDDLIIVIPIEGEFKDYDYTIPQTIVENIKMKIPNLKIQPEKTGNYFYTNDKIIDLEFKNTKLDYLGFSFNGEEVRIREKSLFKYYTRMYRKIRICNRKSKEFGRKSYRKALYRNYSHLGKKKKGHGNFLSYASRAQEIFDKESSTVNLMETQVKKHWKNINARLEDPE

SEQ ID NO: 804 - protein, 430 aa, Bacillus cereus
MDKKKYSIKRYKHLDKKKSIEKVKDKIQDPQWVAKHGFYPFIHFEIKFQKYSRKEKQAKEKVRKIFYASHIDSYIYKYYGDELNNHYNCIADELGISDIATAYRNNLSGKSNIDFSKEVIDFIKSQKAAYIFVADFTNFFDTLDHKYLKNKIRQVLKEDTLPDDYYNVFKNITRFSYFFKDAIEMDLETKYTESEIKGSYKYFTEEEFRDFKHKNIYRNTKGYGIPQGAGISSVCSNIYLLDFDKEIQNYINEQNGIYRRYCDDLIIVIPIEGEFKYYDYTIPQTIVENIKMKIPNLKIQPEKTGNYFYTNDKIIDLEFKNTKLDYLGFSFNGEEVRIREKSLFKYYTRMYRKIRICNRKSKEFGRKSYRKALYRNYSHLGKKKKGHGNFLSYASRAQEIFDKESSTVNLMETQVKKHWKNINARLEDPE

SEQ ID NO: 805 - protein, 504 aa, Paracoccus sediminicola; identical to SEQ ID NO: 363

SEQ ID NO: 806 - protein, 497 aa, Paracoccus alkenifer; identical to SEQ ID NO: 365

SEQ ID NO: 807 - protein, 491 aa, Paracoccus pantotrophus; identical to SEQ ID NO: 366

SEQ ID NO: 808 - protein, 464 aa, Exiguobacterium marinum; identical to SEQ ID NO: 379

SEQ ID NO: 809 - protein, 479 aa, Rhizobium leguminosarum
MKPWTPSVPLYPHFDAKIPPAEAERIVKDPQLVATHKFFPFLKYDERWTMFAQKGSRGKSKQRPIRFAARLDSCIFSYYRHQLSEPYEQQLKAADLGTSIIAYRRIPKADGKGGQSNIDFALSAFEAVQRLGNCCAVALDISSFFENLDHAQLQSVWAGLIGQTRLPPDHYKVFQAITRYAFADVKKVYERLGYFGDKEDRHGKVRKGYLRSRQQIPTQLCTGKTFREKIAGEGPLASIIEVNKTDKGVPQGAPLSDLLANAYLLKFDKFVQELCTGFGGTYYRYSDDILIVAPISASDALGLEADIRKVISTHGGGLIIKEEKSAVHQFHTDGARQRVTVVKATDKDGKPAWSKPFEYLGFRYDGRSAFIRDKTMSNLHRKIASICRATAIRLTKRYQGKCTDEIMDMADFERLFQSFGSVQDFHEKSDDYRSWTFTTYAKRAAKTMGPLGTPIGAQLKGLRRAIEDRLRKELSRVGA

SEQ ID NO: 810 - protein, 479 aa, Rhizobium leguminosarum
MKPWTPTVRRYPHFDPVISVEEAAAIATNPTQVAMHTFYPFLKYNEGWTAFAKKGTFGRRKDRPIRYAARLDSCIFSYYRYLLSEPYEQKLLAEGLTNSVIAYRRILKSNGRGGQSNVEFALSAVDAIRGLGNCCTLALDISSFFESLDHVRLREVWGDLLGVSRLPEDHFRVYQAITKYAYVELEEAYERLGFYGEKKDRHGKTRPGFLRSLKEMPVQLCDGRSFRAKIASDGGLPSIIKTNKEGMGVPQGAPLSDLLANAYLLEFDKFVRDLCAKVGGTYFRYSDDILIVAPINVEKALEMEQDVRAAISALGKGLVIKEAKSAIHRFEYGNGRQNISVIKAFDKNDKPMPSKPFEYLGFRYDGCSVFIRDKTMSNLHRKIASVCRASAIKMVKRYQGKAVDEILEMADLERLIQAFGPVEDFRSKASDYRAWTFTTYAKRASRAMGTLGKPIARQLGGLRRSIKTRLAAELQRALS

SEQ ID NO: 811 - protein, 460 aa, Salinicoccus cyprini; identical to SEQ ID NO: 381

SEQ ID NO: 812 - protein, 460 aa, Psychrobacillus soli; identical to SEQ ID NO: 382

SEQ ID NO: 813 - protein, 478 aa, Agrobacterium tumefaciens; identical to SEQ ID NO: 384

SEQ ID NO: 814 - protein, 478 aa, Agrobacterium deltaense; identical to SEQ ID NO: 387

SEQ ID NO: 815 - protein, 444 aa, Lysinibacillus sp.
MKWSKYRPKKYLHFDKRIDLKHNEHMKANIQDPNWVASYAFLPSIHFKIQFKKYITLKNENGEKIKKKDKKIREIYYAAHKDGFIYKYYGDLLNYAYNDYVSEKGIDNIAVAYRNNKSGKNNIDFAYEVFDFLLKQNQAIVIALDFTSFFDNIDHKSLKQKIKRVLDVEELPKDWYKIYRNITCYSYVERDDLEEFLLDKYGKKKLKKIRSRLLQIMEPAEFRQFKQGKVQVNKKSFGIPQGSGMSAVCSNVHLIDFDKEVLEWAKQKHPDALYRRYCDDLILVIPTTNATVGLLEEWKNELMIQIGRYKDDGLIIQEKKTELRLFREKIIYNEKMEISPLDYLGFVIDKNIIRIREKSLFKYYSRAYKKAKTSKRIAYATSRPGPKRKLYDLYTHLGNKYLGYGNFNAYAKKAHILMKELPFKSHIKKQLKRHWRKIHKRLSD

SEQ ID NO: 816 - protein, 444 aa, Lysinibacillus fusiformis; identical to SEQ ID NO: 815

SEQ ID NO: 817 - protein, 465 aa, Lysinibacillus sphaericus; identical to SEQ ID NO: 388

SEQ ID NO: 818 - protein, 463 aa, Larkinella punicea; identical to SEQ ID NO: 395

SEQ ID NO: 819 - protein, 499 aa, Rhodobacter capsulatus
MLRPHSWRAMQDEFDFTTKDLKHYPHFDAPLSLREIRRLVTSPERVAANSFYPFFLYEESWQPYRSADAAKPDKKTRPIRYGARRDAYIFAFYRRKLSRLYEARLRTLGIEDCPIAYRQVSKSGLGGGKCNIDFAKDAFDEIDRLGDCVAVALDIKGYFENLDHRRIKQIWCDLLGVAELPPDHYAVFKNITKYHFVDQRTTYRRLGYFGLRERNGEMIDGFLRPYRDMPKQLCSNADFRAKICGGDPAYPSIIKKNDKPHGVPQGAPISDLIANFYLLEFDVVMAAYARARGGRYMRYSDDILLILPGGASEASAAVAFATAEMLNHGPELRIKDSKTCVAQFERVAGALRFQHLAQRPDEPAKNGFEYLGFRYDGRCVYVRDSTISRFFGKVAGAAKRDGRRHVEANPAMDAGDLIRAFDFSLFSQRFSRVKKEKLTDDYRSWTFYSYLKRSAEAFGPKGDRILKQARGFDDFMKARVSGAIVTAAAKRKAPAKTAA

SEQ ID NO: 820 - protein, 499 aa, Rhodobacter capsulatus; identical to SEQ ID NO: 819

SEQ ID NO: 821 - protein, 467 aa, Acinetobacter nosocomialis
MLSFNQYQEEIYFKKHQLKASNNSKLKSRVHFDTPLDAHSAFALVSNPEKVSKHWFLPFIGFDQSVRKIRKHNGLTRRISKVRPLRYAANRDGYIYAYYSYLLDKQYENLIKETSLNSSVLAYRSLGKSNVDFAKEVFDWIAQTQGCNVLTIDLSSFFDTLDHEILKKQWQKVNNVERLSQDHYIVFKSLTNYSFMNMEDVLFALGWSDKFNRKRLGEKIPSPLRKKTSAPYQSLDDFRDIRKFRFSGPNGSFKYLVQTPEKIDGKRYGIPQGSPMSAILSNIYMLDFDHYCSELMKEIGGLYKRYCDDIIVLFPEIIKIDDIYKSLEKALHEYGGTQLKINPSKVEKTKFINKNGNLTAIDAVTNNYKPLQYLGFIYDGQKVLIRSSSLSNYYRRLISKIRSSKNKALQNNSRPYRRKIYRMYSHLARKQRNFITYAYKASATMEDNLIKRQLSNHWQRIHKELNK

SEQ ID NO: 822 - protein, 301 aa, Acinetobacter baumannii
MLSFNQYQEEIYLKKHQLKASNNSKLKSRVHFDTPLDAHSAFALVSNPEKVSKHWFLPFIGFDQSVRKIRKHNGLTRRISKVRPLRYAANRDGYIYAYYSYLLDKQYENLIKETSLNSSVLAYRSLGKSNVDFAKEVFDWIAQSQGCNVLTIDLSSFFDTLDHEILKKQWQKVNNVERLSQDHYMVFKSLTNYSFMNMEDVLFALGWSDKFNRKRLGEKIPSPLRKKTSAPYQSLDDFRDIRKFRFSGPNGSFKYLVQTPEKIDGKRYGIPQGSPMSAILSNIYMLDFDHYCSELMKEIGG

SEQ ID NO: 823 - protein, 420 aa, Acinetobacter baumannii
MLSFNQYQEEIYLKKHQLKASNNSKLKSRVHFDTPLDAHSAFALVSNPEKVSKHWFLPFIGFDQSVRKIRKHNGLTRRISKVRPLRYAANRDGYIYAYYSYLLDKQYENLIKETSLNSSVLAYRSLGKSNVDFAKEVFDWIAQSQGCNVLTIDLSSFFDTLDHEILKKQWQKVNNVERLSQDHYMVFKSLTNYSFMNMEDVLFALGWSDKFNRKRLGEKIPSPLRKKTSAPYQSLDDFRDIRKFRFSGPNGSFKYLVQTPEKIDGKRYGIPQGSPMSAILSNIYMLDFDHYCSELMKEIGGLYKRYCDDIIVLFPEIIKIDDIYKSLEKALHEYGGTQLKTNPSKVEKIKFINKNGNLTAIDAVTNNYKPLQYLGFIYDGQKVLIRSSSLSNYYRRLISKIRSSKNKALQNNSRPYRRKI

SEQ ID NO: 824 - protein, 430 aa, Bacillus subtilis; identical to SEQ ID NO: 400

SEQ ID NO: 825 - RNA, 255 nt, Synthetic construct
  source 1..255: mol_type = other RNA
gtcgctgatcaaaaggagcttaacaggttgtcaagtccaatcggcacgccaccaaggcaagctgagcagatagacagcatgaactggaacagggtcttcatagatacctccacggttatagttatagcataatccatttctaacatgacgcggctagagttttaggactcgtggatggttgttttaacaacttggttaagccgaggtaaggcgtgaggaattgccgcagttctaagtctgcctcggttttgctag

SEQ ID NO: 826 - RNA, 281 nt, Synthetic construct
  source 1..281: mol_type = other RNA
gccctaaacaaaggtttaggggtattgtacaggttgtcaagcctcccacagttcttggtgaaaccaatcactgtgacgacggtaagcaacacttggatgatattcataattgactccacgctactgattacattatacagcatatctaacatttgcggcgaggttcacaatttgtatttaggtactgattgtggatgagaaggttggagaaagaccacttggttaagccggaggatgtgtcctagaattgtcgctattctgtcatcctccggttttgctaa

SEQ ID NO: 827 - RNA, 281 nt, Synthetic construct
  source 1..281: mol_type = other RNA
gccctaaacaaaggtttaggggtattgtacaggttgtcaagcctcccacaggtcttggtgaaaccaatcactgtgacgacggtaagcaacacttggatgatattcataattgactccacgctactgattacattatacagcatatctaacatttgcggcgaggttcacaatttgtatttaggtactgattgtggatgagaaggttggagaaagaccacttggttaagccggaggatgtgtcctagaattgtcgctattctgtcatcctccggttttgctaa

SEQ ID NO: 828 - RNA, 279 nt, Synthetic construct
  source 1..279: mol_type = other RNA
gccctacgcatcggcgtaggggtgatgtacagtttgtcaactcccggccagcgaccttcgctgaacaccgaccagaggctgactagcaggtggatgatattcattattgtctccattatactgattacattatacagtgtttctaacatttgcggtgaaatgcacttttggactacaagtagtccattgtgtatgagaaggttggataaagaccactttgttaagccggggcaatgtattttgaacgaccgcagttcaaaattgccccggtttcacaat

SEQ ID NO: 829 - RNA, 251 nt, Synthetic construct
  source 1..251: mol_type = other RNA
gctttacgcgataggcgtgaagggctgtgacagattgtcaatgcctttatccttgcagagccaagataaacacattgtcatgaagcgtaagattaccattgtatagtctccatcgcagattacattatatatcatttctaatagatcgcggcgtgtgcctttaggggccagatgattggttaggccagttagttaaagcccaaagggatatacggaaaggccgcatgtccactccctttgggttttgctag

SEQ ID NO: 830 - RNA, 278 nt, Synthetic construct
  source 1..278: mol_type = other RNA
gccccgtgggttcgctgcgggggagcactacaggatgtcaactgacctgcactggcggctagccgctagcacatgacagtacggcacccacgtgaagacgttgaatagagtgactttcataaagttctccaatgtgctcacagtgatagtgtacatgattgataacaccatgcggctcgctgcgggtaaccgcggttagaagtgcaaaagatgcactggctcatgccggcagagggataatgggatcgtcgcagtcctacctctgccggtttggctag

SEQ ID NO: 831 - RNA, 260 nt, Synthetic construct
  source 1..260: mol_type = other RNA
gctctacgtgtagatgtagaggaatattacaggttgtcaagtccactgagccagaaagcaagtttggcaaagcagattgataacagaactgtgcctggattccgcaaggaagcctccatagtgatattaatagtatgaagcatttctaacatatgcggcttggctcaacttgttgagtgagatggtagagaaatactacttggttaatccgggagaacggtcaatagattgccgccatcttcgttctcccggtttgctag

SEQ ID NO: 832 - RNA, 267 nt, Synthetic construct
  source 1..267: mol_type = other RNA
gctcatcggatttgccggtgaggaaagtgacaggttgtcaagccacgcgaatccgctccatgagctgagacgcaacgcggacaacacgtagaacaggacttccgtcatacggacctctacgatgatactgccatgatactgcatttctaacatttagcggccaaagctcagttttcggactgagtgagataatgtgaagaacattgttgtatatccggggaggcggttattggaatgccgccaaccatcgcctctccggtttgctag

SEQ ID NO: 833 - RNA, 260 nt, Synthetic construct
  source 1..260: mol_type = other RNA
gcttgtggcattaggccacgaggtggatcacaagttgtcaagccacccatgattatttatcagcgggacacacatggcgaacaacagcacgcggaatctcttcattgagaacctccagatgtaatcgtgatactgacactatacgtcaactctagcaatacgcggcctagtctgaaaggatggataatgtttagagcattaagttgagccggtggggcggtttagggattgccgccatcctagtcccaccggttggctta

SEQ ID NO: 834 - RNA, 283 nt, Synthetic construct
  source 1..283: mol_type = other RNA
gctttggatgtagatccaaaggtgcatcacaagctgtcaaggcccatcgcggcaccacaggtgaaataacccagggtgaccagcagtgcggccagcagcgctcggatacttattctcataggtactccaagtgtgacgctgacattatacgtcgatcctagcaatcgcggcgaaatcggaactgggtgactatgaccgattggatgatgtgaggagcattttggtttatccggccaggcggcttatgggattgccgccatcctaagcctggccggttggctaa

SEQ ID NO: 835 - DNA, 120 bp, Synthetic construct
  source 1..120: mol_type = other DNA
tagaaatggattatgctataactataaccgtggaggtatctatgaagaccctgttccagttcatgctgtctatctgctcagcttgccttggtggcgtgccgattggacttgacaacctgt

SEQ ID NO: 836 - DNA, 120 bp, Synthetic construct
  source 1..120: mol_type = other DNA
tagatatgctgtataatgtaatcagtagcgtggagtcaattatgaatatcatccaagtgttgcttaccgtcgtcacagtgattggtttcaccaagaactgtgggaggcttgacaacctgt

SEQ ID NO: 837 - DNA, 120 bp, Synthetic construct
  source 1..120: mol_type = other DNA
tagatatgctgtataatgtaatcagtagcgtggagtcaattatgaatatcatccaagtgttgcttaccgtcgtcacagtgattggtttcaccaagacctgtgggaggcttgacaacctgt

SEQ ID NO: 838 - DNA, 117 bp, Synthetic construct
  source 1..117: mol_type = other DNA
tagaaacactgtataatgtaatcagtataatggagacaataatgaatatcatccacctgctagtcagcctctggtcggtgttcagcgaaggtcgctggccgggagttgacaaactgt

SEQ ID NO: 839 - DNA, 111 bp, Synthetic construct
  source 1..111: mol_type = other DNA
tagaaatgatatataatgtaatctgcgatggagactatacaatggtaatcttacgcttcatgacaatgtgtttatcttggctctgcaaggataaaggcattgacaatctgt

SEQ ID NO: 840 - DNA, 135 bp, Synthetic construct
  source 1..135: mol_type = other DNA
tatcaatcatgtacactatcactgtgagcacattggagaactttatgaaagtcactctattcaacgtcttcacgtgggtgccgtactgtcatgtgctagcggctagccgccagtgcaggtcagttgacatcctgt

SEQ ID NO: 841 - DNA, 120 bp, Synthetic construct
  source 1..120: mol_type = other DNA
tagaaatgcttcatactattaatatcactatggaggcttccttgcggaatccaggcacagttctgttatcaatctgctttgccaaacttgctttctggctcagtggacttgacaacctgt

SEQ ID NO: 842 - DNA, 120 bp, Synthetic construct
  source 1..120: mol_type = other DNA
tagaaatgcagtatcatggcagtatcatcgtagaggtccgtatgacggaagtcctgttctacgtgttgtccgcgttgcgtctcagctcatggagcggattcgcgtggcttgacaacctgt

SEQ ID NO: 843 - DNA, 125 bp, Synthetic construct
  source 1..125: mol_type = other DNA
tagagttgacgtatagtgtcagtatcacgattacatctggaggttctcaatgaagagattccgcgtgctgttgttcgccatgtgtgtcccgctgataaataatcatgggtggcttgacaacttgt

SEQ ID NO: 844 - DNA, 132 bp, Synthetic construct
  source 1..132: mol_type = other DNA
taggatcgacgtataatgtcagcgtcacacttggagtacctatgagaataagtatccgagcgctgctggccgcactgctggtcaccctgggttatttcacctgtggtgccgcgatgggccttgacagcttgt

SEQ ID NO: 845 - RNA, 158 nt, Synthetic construct
  source 1..158: mol_type = other RNA
gccctaaacaaaggtttaggggtattgtacaggttgtcaagcctcccacaggtcttggtgaaaccaatcactgtgacgacggtaagcaacacttggatgatattcataattgactccacgctactgattacattatacagcatatctaacatttgcgg

SEQ ID NO: 846 - RNA, 281 nt, Synthetic construct
  source 1..281: mol_type = other RNA
gccctaaacaaaggtttaggggtattgtacaggttgtcaagcctcccacaggtcttggtgaaaccaatcactgtgacgacggtaagcaacacttggatgatattcataattgactccacgctactgattacattatacagcatatctaacatttgcggcgagtgtgtgttatagtgttgggatacctaaatcttatgagaaggttggagaaagaccacttggttaagccggaggatgtgtcctagaattgtcgctattctgtcatcctccggttttgctaa

SEQ ID NO: 847 - RNA, 281 nt, Synthetic construct
  source 1..281: mol_type = other RNA
gccctaaacaaaggtttaggggtattgtacaggttgtcaagcctcccacaggtcttggtgaaaccaatcactgtgacgacggtaagcaacacttggatgatattcataattgactccacgctactgattacattatacagcatatctaacatttgcggcgaggttcacaatttgtatttaggtactgattgtggatgagaaagggaacgtagactgacttggttaagccggaggatgtgtcctagaattgtcgctattctgtcatcctccggttttgctaa

SEQ ID NO: 848 - RNA, 281 nt, Synthetic construct
  source 1..281: mol_type = other RNA
gccctaaacaaaggtttaggggtattgtacaggttgtcaagcctcccacaggtcttggtgaaaccaatcactgtgacgacggtaagcaacacttggatgatattcataattgactccacgctactgattacattatacagcatatctaacatttgcggcgaggttcacaatttgtatttaggtactgattgtggatgagaaggttggagaaagaccactttatggttggcgacattttatcgagaacgttaggagggccttcttcggctcttcgtactcta

SEQ ID NO: 849 - RNA, 286 nt, Synthetic construct
  source 1..286: mol_type = other RNA
gccctaaacaaaggtttaggggtattgtacaggttgtcaagcctcccacaggtcttggtgaaaccaatcactgtgacgacggtaagcaacacttggatgatattcataattgactccacgctactgattacattatacagcatatctaacatttgcggcgaggttcacaatttgtatttaggtactgattgtggatgagaaggttggagaaagaccacttggttaagccggaggatgtgtcctagaattgtcgctattctgtcatcctccggttttgctaatattc

SEQ ID NO: 850 - RNA, 281 nt, Synthetic construct
  source 1..281: mol_type = other RNA
gccctaaacaaaggtttaggggtattgtacaggttgtcaagcctcccacaggtcttggtgaaaccaatcactgtgacgacggtaagcaacacttggatgatattcataattgactccacgctactgattacattatacagcatatctacgctttgcggcgaggttcacaatttgtatttaggtactgattgtggatgagaaggttggagaaagaccacttggttaagccggaggatgtgtcctagaattgtcgctattctgtcatcctccggttttgctaa

SEQ ID NO: 851 - RNA, 281 nt, Synthetic construct
  source 1..281: mol_type = other RNA
gccctaaacaaaggtttaggggtattccggaggttgtcaagcctcccacaggtcttggtgaaaccaatcactgtgacgacggtaagcaacacttggatgatattcataattgactccacgctactgattacattatacagcatatctaggatttgcggcgaggttcacaatttgtatttaggtactgattgtggatgagaaggttggagaaagaccacttggttaagccggaggatgtgtcctagaattgtcgctattctgtcatcctccggttttgctaa

SEQ ID NO: 852 - RNA, 281 nt, Synthetic construct
  source 1..281: mol_type = other RNA
gccctaaacaaaggtttaggggtattgtacaggttgtcaagcctcccacaggtcttggtgaaaccaatcactgtgacgtgaatctttactcccaagcggatattcataattgactccacgctactgattacattatacagcatatctaacatttgcggcgaggttcacaatttgtatttaggtactgattgtggatgagaaggttggagaaagaccacttggttaagccggaggatgtgtcctagaattgtcgctattctgtcatcctccggttttgctaa

SEQ ID NO: 853 - RNA, 281 nt, Synthetic construct
  source 1..281: mol_type = other RNA
gccctaaacaaaggtttaggggtattgtacaggttgtcaagcctcccacaggtcttggtgaaaccaattggactaatatgaatctttactcccaagcgaaaacgggtgattgactccacgctactgattacattatacagcatatctaacatttgcggcgaggttcacaatttgtatttaggtactgattgtggatgagaaggttggagaaagaccacttggttaagccggaggatgtgtcctagaattgtcgctattctgtcatcctccggttttgctaa

SEQ ID NO: 854 - RNA, 281 nt, Synthetic construct
  source 1..281: mol_type = other RNA
gccctaaacaaaggtttaggggtattgtacaggttgtcaagcctcccacaggtcttggtagcatcaggtggactaatatgaatctttactcccaagcgaaaacgggtgcgtggactagcgctactgattacattatacagcatatctaacatttgcggcgaggttcacaatttgtatttaggtactgattgtggatgagaaggttggagaaagaccacttggttaagccggaggatgtgtcctagaattgtcgctattctgtcatcctccggttttgctaa

SEQ ID NO: 855 - RNA, 281 nt, Synthetic construct
  source 1..281: mol_type = other RNA
gccctaaacaaaggtttaggggtattgtacaggttgtcaagcctcccatattttacgttagcatcaggtggactaatatgaatctttactcccaagcgaaaacgggtgcgtggactagcgaggagcaatacattatacagcatatctaacatttgcggcgaggttcacaatttgtatttaggtactgattgtggatgagaaggttggagaaagaccacttggttaagccggaggatgtgtcctagaattgtcgctattctgtcatcctccggttttgctaa

SEQ ID NO: 856 - RNA, 281 nt, Synthetic construct
  source 1..281: mol_type = other RNA
gccctaaacaaaggtttaggggtattgtacaggttgtcgtccccagggtattttacgttagcatcaggtggactaatatgaatctttactcccaagcgaaaacgggtgcgtggactagcgaggagcaaacgaaaattcagcatatctaacatttgcggcgaggttcacaatttgtatttaggtactgattgtggatgagaaggttggagaaagaccacttggttaagccggaggatgtgtcctagaattgtcgctattctgtcatcctccggttttgctaa

SEQ ID NO: 857 - RNA, 281 nt, Synthetic construct
  source 1..281: mol_type = other RNA
gccctaaacaaaggtttaggggtattgtacacgtcggcgtccccagggtattttacgttagcatcaggtggactaatatgaatctttactcccaagcgaaaacgggtgcgtggactagcgaggagcaaacgaaaattcttggcctgctacatttgcggcgaggttcacaatttgtatttaggtactgattgtggatgagaaggttggagaaagaccacttggttaagccggaggatgtgtcctagaattgtcgctattctgtcatcctccggttttgctaa

SEQ ID NO: 858 - RNA, 281 nt, Synthetic construct
  source 1..281: mol_type = other RNA
gccctaaacaaaggtttaggggtattgttaccgtcggcgtccccagggtattttacgttagcatcaggtggactaatatgaatctttactcccaagcgaaaacgggtgcgtggactagcgaggagcaaacgaaaattcttggcctgctacatttgcggcgaggttcacaatttgtatttaggtactgattgtggatgagaaggttggagaaagaccacttggttaagccggaggatgtgtcctagaattgtcgctattctgtcatcctccggttttgctaa

SEQ ID NO: 859 - RNA, 281 nt, Synthetic construct
  source 1..281: mol_type = other RNA
gccctaaacaaaggtttaggggtattgtacacattatgcagcctggttggatcaatacccaagagaaccgcgaacctaccgctgattatgggctggatgatattcataattgactccacgctactgattacattatacagcatatctaacatttgcggcgaggttcacaatttgtatttaggtactgattgtggatgagaaggttggagaaagaccacttggttaagccggaggatgtgtcctagaattgtcgctattctgtcatcctccggttttgctaa

SEQ ID NO: 860 - RNA, 281 nt, Synthetic construct
  source 1..281: mol_type = other RNA
gccctaaacaaaggtttaggggtattgtacaggttgtcaagcctcccacaggtcttggtgaaaccaatcactgtgacgacggtaagcaacactagcattcttttgaattagctacagacgctactgattacattatacagcatatctaacatttgcggcgaggttcacaatttgtatttaggtactgattgtggatgagaaggttggagaaagaccacttggttaagccggaggatgtgtcctagaattgtcgctattctgtcatcctccggttttgctaa

SEQ ID NO: 861 - RNA, 281 nt, Synthetic construct
  source 1..281: mol_type = other RNA
gccctaaacaaaggtttaggggtattgtacaccaacagttcggagggtgtccagaaccactttggttagtgacactgctgccattcgttgtgaacctactataagtattaactgaggtgcgatgactaatgtaatatgtcgtatagatacatttgcggcgaggttcacaatttgtatttaggtactgattgtggatgagaaggttggagaaagaccacttggttaagccggaggatgtgtcctagaattgtcgctattctgtcatcctccggttttgctaa

SEQ ID NO: 862 - RNA, 281 nt, Synthetic construct
  source 1..281: mol_type = other RNA
gccctaaacaaaggtttaggggtattgtacaccaacagttcggagggtgtccagaaccactttggttagtgacactgctgccattcgttgtgaacctactataagtattaactgaggtgcgatgactaatgtaatatgtcgtatagtaacatttgcggcgaggttcacaatttgtatttaggtactgattgtggatgagaaggttggagaaagaccacttggttaagccggaggatgtgtcctagaattgtcgctattctgtcatcctccggttttgctaa

SEQ ID NO: 863 - RNA, 281 nt, Synthetic construct
  source 1..281: mol_type = other RNA
gccctaaacaaaggtttaggggtattgtacaggttgtcaagtccaatcggcacgccaccaaggcaagctgagcagatagacagcatgaactggaacagggtcttcatagatacctccacggttatagttatagcataatccatttctaacatttgcggcgaggttcacaatttgtatttaggtactgattgtggatgagaaggttggagaaagaccacttggttaagccggaggatgtgtcctagaattgtcgctattctgtcatcctccggttttgctaa

SEQ ID NO: 864 - RNA, 531 nt, Synthetic construct
  source 1..531: mol_type = other RNA
gccctaaacaaaggtttaggggtattgtacaggttgtcaagcctcccacaggtcttggtgaaaccaatcactgtgacgacggtaagcaacacttggatgattgctagaggatggaatgaccttaaatcagggacgatattaaacggaacgtatattcaacgcaatgaagccggaggattggcgtgggaatcgtgcttctgtctaagcaagtaagggtatgaggtcgcaaccgtcccccaagcgtacagggtgcactttgtaacgatttgggagtccagagactcgctgttttcgaaatttgccctcaagcgcgagtattgaaccaggcttacgcccaagaacgtagcaagcattcataattgactccacgctactgattacattatacagcatatctaacatttgcggcgaggttcacaatttgtatttaggtactgattgtggatgagaaggttggagaaagaccacttggttaagccggaggatgtgtcctagaattgtcgctattctgtcatcctccggttttgctaa

SEQ ID NO: 865 - RNA, 381 nt, Synthetic construct
  source 1..381: mol_type = other RNA
gccctaaacaaaggtttaggggtattgtacaggttgtcaagcctcccacaggtcttggtgaaaccaatcactgtgacgacggtaagcaacacttggatgattgctagaggatggaatgaccttaaatcagggacgatattaaacggaacgtccctcaagcgcgagtattgaaccaggcttacgcccaagaacgtagcaagcattcataattgactccacgctactgattacattatacagcatatctaacatttgcggcgaggttcacaatttgtatttaggtactgattgtggatgagaaggttggagaaagaccacttggttaagccggaggatgtgtcctagaattgtcgctattctgtcatcctccggttttgctaa

SEQ ID NO: 866 - RNA, 497 nt, Synthetic construct
  source 1..497: mol_type = other RNA
gccctaaacaaaggtttaggggtattgtacattaaacgtggtctgaccccaccagctggacaccaataaaatattgaagtccacctttgccgtcaaagaccggctgcaagtgcagtaagttccaaaactttttcccggatttcgtgtagttgataagctgaacggtcgtcgggcgacggtcgcggatagcgtcacgaattttttgcaccgtggcttggtcagtttctggcccctgcaaaaaacgcgcgttgcgtcccataatctcttcacgggaatactccgtcaattccaagaaaccatctgaagctgaaatgatcgggtaatcaggcagccaggggtcagtaatcacgaacgatttttccatacatttgcggcgaggttcacaatttgtatttaggtactgattgtggatgagaaggttggagaaagaccacttggttaagccggaggatgtgtcctagaattgtcgctattctgtcatcctccggttttgctaa

SEQ ID NO: 867 - DNA, 2332 bp, Synthetic construct
  source 1..2332: mol_type = other DNA
cgcaataactagcataaccccttggggcctctaaacgggtcttgaggggttttttgctgaaacctcaggcatttgagaagcacacggtcacactgcttccggtagtcaataaaccggtaaaccagcaatagacataagcggctatttaacgaccctgccctgaaccgacgaccgggtcgaatttgctttcgaatttctgccattcatccgcttattatcacttattcaggcgtagcaccaggcgtttaagggcaccaataactgccttaaaaaaattacgccccgccctgccactcatcgcaatactgttgtaattcatttaacattctgccgacatggaagccatcacagacggcatgatgaacctgaatcgccagcggcatcagcaccttgtcgccttgcgtataatatttgcccatagtgaaaacgggggcgaagaagttgtccatattggccacgtttaaatcaaaactggtgaaactcacccagggattggctgagacgaaaaacatattctcaataaaccctttagggaaataggccaggttttcaccgtaacacgccacatcttgcgaatatatgtgtagaaactgccggaaatcgtcgtggtattcactccagagcgatgaaaacgtttcagtttgctcatggaaaacggtgtaacaagggtgaacactatcccatatcaccagctcaccgtctttcatcgccatacggaactctggatgagcattcatcaggcgggcaagaatgtgaataaaggccggataaaacttgtgcttatttttctttacggtctttaaaaaggccgtaatatccagctgaacggtctggttataggtacattgagcaactgactgaaatgcctcaaaatgttctttacgatgccattgggatatatcaacggtggtatatccagtgatttttttctccattttagcttccttagctcctgaaaatctcgataactcaaaaaatacgcccggtagtgatcttatttcattatggtgaaagttggaacctcttacgtgccgatcaacgtctcattttcgccaaaagttggcccagggcttcccggtatcaacagggacaccaggatttatttattctgcgaagtgatcttccgtcacaggtatttattcggcgcaaagtgcgtcgggtgatgctgccaacttactgatttagtgtatgatggtgtttttgaggtgctccagtggcttctgtttctatcagctgtccctcctgttcagctactgacggggtggtgcgtaacggcaaaagcaccgccggacatcagcgctagcggagtgtatactggcttactatgttggcactgatgagggtgtcagtgaagtgcttcatgtggcaggagaaaaaaggctgcaccggtgcgtcagcagaatatgtgatacaggatatattccgcttcctcgctcactgactcgctacgctcggtcgttcgactgcggcgagcggaaatggcttacgaacggggcggagatttcctggaagatgccaggaagatacttaacagggaagtgagagggccgcggcaaagccgtttttccataggctccgcccccctgacaagcatcacgaaatctgacgctcaaatcagtggtggcgaaacccgacaggactataaagataccaggcgtttccccctggcggctccctcgtgcgctctcctgttcctgcctttcggtttaccggtgtcattccgctgttatggccgcgtttgtctcattccacgcctgacactcagttccgggtaggcagttcgctccaagctggactgtatgcacgaaccccccgttcagtccgaccgctgcgccttatccggtaactatcgtcttgagtccaacccggaaagacatgcaaaagcaccactggcagcagccactggtaattgatttagaggagttagtcttgaagtcatgcgccggttaaggctaaactgaaaggacaagttttggtgactgcgctcctccaagccagttacctcggttcaaagagttggtagctcagagaaccttcgaaaaaccgccctgcaaggcggttttttcgttttcagagcaagagattacgcgcagaccaaaacgatctcaagaagatcatcttattaatcagataaaatatttctagatttcagtgcaatttatctcttcaaatgtagcacctgaagtcagccccatacgatataagttgtaattctcatgttagtcatgccccgcgcccaccggaaggagctgactgggttgaaggctctcaagggcatcggtcgagatcccggtgcctaatgagtgagctaacttacattaattgcgttgcg

SEQ ID NO: 868 - DNA, 4114 bp, Synthetic construct
  source 1..4114: mol_type = other DNA
acacgatataaaaccatctcattgcttgctgggttaactgagttgctgaatttttttctagaatttcgcaaaatttaataggtaaaccttgtttttttaaatttacgatgatataaaaataatgccctaaacaaaggtttaggggtattgtacaggttgtcaagcctcccacaggtcttggtgaaaccaatcactgtgacgacggtaagcaacacttggatgatattcataattgactccacgctactgattacattatacagcatatctaacatttgcggcgaggttcacaatttgtatttaggtactgattgtggatgagaaggttggagaaagaccacttggttaagccggaggatgtgtcctagaattgtcgctattctgtcatcctccggttttgctaatttcattcagggaatataatgaataatgatgattacccatggttcagaaaacgtggttatttgcatttcgatgaacctgtttcattaaaaaaagcggttaaatatgtttcctctccagaaaaaataataaaacattcttttctgccatttttaagctttgaagtaaaatcgtttaaaatcaaaaaagacaaatcaacaaaacaattaagtaaaactgaaaaattaagacctattgcctattcctcacatttggatagtcatatttatgcattttacgcagaatatcttactggacattatgaattattgatccaagaaaacaatttacacgagaacatccttgccttcagatctttaaataaaagcaatatagaatttgccaagagagcatttgatacaattactgaaatgggtgagtgtagcgctgttgcattagatctttctggtttttttgacaatttagatcatcaaattttgaaacaccagtggtgcaaagttattgggactgaagcgttgccgcaagaccattttgccatatacaaaagtataacaagatattctaaagttgataaaaatagagcgtatgagattttaggtatatcaaagaataaccccaagtataatagacgcaagatctgcacccctgttgattttagaaataagattagaaaaaatggtcttattatagttaataattcccaaaaaggtataccccaaggctcgccaattagtgctctactttcaaatatatatatgcttgactttgatattgaaatgagagattacgcgcaggaacgtggtggccattattatcgctattgtgatgatatgctattcattgtaccaactaagtataataaaactctagcaggtgatgtagcccagcggattaagcatcttaaggtagaactcaatactaagaaaactgagattcgagattttatatacaaagacagtaccttagtggcaaatatgcctttacagtatcttgggtttatttttgatgggagtaatatattattacgttcatcttctctcgcaagatattcggaacgaatgaaaagaggtgtccgcttagcaaaagctacaatggacagcaagaataggattagagaaaataaaggtgaagctttaaaagctttatttaagaaaaaattatatgccagatattcacatattggaagaaggaattttttgacttatggttatcgcgccgcgaagatcatgaattcgaaagctataaaaagacagttaaaaccattgcagaaaagattggaaaatgaaatactaaaataaatatttgctggcccgaatcatacagggccacaatacagttgaaaacaagctataataaacaacatctaatttttatataccgcaataactagcataaccccttggggcctctaaacgggtcttgaggggttttttgctgaaacctcaggcatttgagaagcacacggtcacactgcttccggtagtcaataaaccggtaaaccagcaatagacataagcggctatttaacgaccctgccctgaaccgacgaccgggtcgaatttgctttcgaatttctgccattcatccgcttattatcacttattcaggcgtagcaccaggcgtttaagggcaccaataactgccttaaaaaaattacgccccgccctgccactcatcgcaatactgttgtaattcatttaacattctgccgacatggaagccatcacagacggcatgatgaacctgaatcgccagcggcatcagcaccttgtcgccttgcgtataatatttgcccatagtgaaaacgggggcgaagaagttgtccatattggccacgtttaaatcaaaactggtgaaactcacccagggattggctgagacgaaaaacatattctcaataaaccctttagggaaataggccaggttttcaccgtaacacgccacatcttgcgaatatatgtgtagaaactgccggaaatcgtcgtggtattcactccagagcgatgaaaacgtttcagtttgctcatggaaaacggtgtaacaagggtgaacactatcccatatcaccagctcaccgtctttcatcgccatacggaactctggatgagcattcatcaggcgggcaagaatgtgaataaaggccggataaaacttgtgcttatttttctttacggtctttaaaaaggccgtaatatccagctgaacggtctggttataggtacattgagcaactgactgaaatgcctcaaaatgttctttacgatgccattgggatatatcaacggtggtatatccagtgatttttttctccattttagcttccttagctcctgaaaatctcgataactcaaaaaatacgcccggtagtgatcttatttcattatggtgaaagttggaacctcttacgtgccgatcaacgtctcattttcgccaaaagttggcccagggcttcccggtatcaacagggacaccaggatttatttattctgcgaagtgatcttccgtcacaggtatttattcggcgcaaagtgcgtcgggtgatgctgccaacttactgatttagtgtatgatggtgtttttgaggtgctccagtggcttctgtttctatcagctgtccctcctgttcagctactgacggggtggtgcgtaacggcaaaagcaccgccggacatcagcgctagcggagtgtatactggcttactatgttggcactgatgagggtgtcagtgaagtgcttcatgtggcaggagaaaaaaggctgcaccggtgcgtcagcagaatatgtgatacaggatatattccgcttcctcgctcactgactcgctacgctcggtcgttcgactgcggcgagcggaaatggcttacgaacggggcggagatttcctggaagatgccaggaagatacttaacagggaagtgagagggccgcggcaaagccgtttttccataggctccgcccccctgacaagcatcacgaaatctgacgctcaaatcagtggtggcgaaacccgacaggactataaagataccaggcgtttccccctggcggctccctcgtgcgctctcctgttcctgcctttcggtttaccggtgtcattccgctgttatggccgcgtttgtctcattccacgcctgacactcagttccgggtaggcagttcgctccaagctggactgtatgcacgaaccccccgttcagtccgaccgctgcgccttatccggtaactatcgtcttgagtccaacccggaaagacatgcaaaagcaccactggcagcagccactggtaattgatttagaggagttagtcttgaagtcatgcgccggttaaggctaaactgaaaggacaagttttggtgactgcgctcctccaagccagttacctcggttcaaagagttggtagctcagagaaccttcgaaaaaccgccctgcaaggcggttttttcgttttcagagcaagagattacgcgcagaccaaaacgatctcaagaagatcatcttattaatcagataaaatatttctagatttcagtgcaatttatctcttcaaatgtagcacctgaagtcagccccatacgatataagttgtaattctcatgttagtcatgccccgcgcccaccggaaggagctgactgggttgaaggctctcaagggcatcggtcgagatcccggtgcctaatgagtgagctaacttacattaattgcgttgcgca

SEQ ID NO: 869 - DNA, 4114 bp, Synthetic construct
  source 1..4114: mol_type = other DNA
acacgatataaaaccatctcattgcttgctgggttaactgagttgctgaatttttttctagaatttcgcaaaatttaataggtaaaccttgtttttttaaatttacgatgatataaaaataatgccctaaacaaaggtttaggggtattgtacaggttgtcaagcctcccacaggtcttggtgaaaccaatcactgtgacgacggtaagcaacacttggatgatattcataattgactccacgctactgattacattatacagcatatctaacatttgcggcgaggttcacaatttgtatttaggtactgattgtggatgagaaggttggagaaagaccacttggttaagccggaggatgtgtcctagaattgtcgctattctgtcatcctccggttttgctaatttcattcagggaatataatgaataatgatgattacccatggttcagaaaacgtggttatttgcatttcgatgaacctgtttcattaaaaaaagcggttaaatatgtttcctctccagaaaaaataataaaacattcttttctgccatttttaagctttgaagtaaaatcgtttaaaatcaaaaaagacaaatcaacaaaacaattaagtaaaactgaaaaattaagacctattgcctattcctcacatttggatagtcatatttatgcattttacgcagaatatcttactggacattatgaattattgatccaagaaaacaatttacacgagaacatccttgccttcagatctttaaataaaagcaatatagaatttgccaagagagcatttgatacaattactgaaatgggtgagtgtagcgctgttgcattagatctttctggtttttttgacaatttagatcatcaaattttgaaacaccagtggtgcaaagttattgggactgaagcgttgccgcaagaccattttgccatatacaaaagtataacaagatattctaaagttgataaaaatagagcgtatgagattttaggtatatcaaagaataaccccaagtataatagacgcaagatctgcacccctgttgattttagaaataagattagaaaaaatggtcttattatagttaataattcccaaaaaggtataccccaaggctcgccaattagtgctctactttcaaatatatatatgcttgactttgatattgaaatgagagattacgcgcaggaacgtggtggccattattatcgctattgtgctgctatgctattcattgtaccaactaagtataataaaactctagcaggtgatgtagcccagcggattaagcatcttaaggtagaactcaatactaagaaaactgagattcgagattttatatacaaagacagtaccttagtggcaaatatgcctttacagtatcttgggtttatttttgatgggagtaatatattattacgttcatcttctctcgcaagatattcggaacgaatgaaaagaggtgtccgcttagcaaaagctacaatggacagcaagaataggattagagaaaataaaggtgaagctttaaaagctttatttaagaaaaaattatatgccagatattcacatattggaagaaggaattttttgacttatggttatcgcgccgcgaagatcatgaattcgaaagctataaaaagacagttaaaaccattgcagaaaagattggaaaatgaaatactaaaataaatatttgctggcccgaatcatacagggccacaatacagttgaaaacaagctataataaacaacatctaatttttatataccgcaataactagcataaccccttggggcctctaaacgggtcttgaggggttttttgctgaaacctcaggcatttgagaagcacacggtcacactgcttccggtagtcaataaaccggtaaaccagcaatagacataagcggctatttaacgaccctgccctgaaccgacgaccgggtcgaatttgctttcgaatttctgccattcatccgcttattatcacttattcaggcgtagcaccaggcgtttaagggcaccaataactgccttaaaaaaattacgccccgccctgccactcatcgcaatactgttgtaattcatttaacattctgccgacatggaagccatcacagacggcatgatgaacctgaatcgccagcggcatcagcaccttgtcgccttgcgtataatatttgcccatagtgaaaacgggggcgaagaagttgtccatattggccacgtttaaatcaaaactggtgaaactcacccagggattggctgagacgaaaaacatattctcaataaaccctttagggaaataggccaggttttcaccgtaacacgccacatcttgcgaatatatgtgtagaaactgccggaaatcgtcgtggtattcactccagagcgatgaaaacgtttcagtttgctcatggaaaacggtgtaacaagggtgaacactatcccatatcaccagctcaccgtctttcatcgccatacggaactctggatgagcattcatcaggcgggcaagaatgtgaataaaggccggataaaacttgtgcttatttttctttacggtctttaaaaaggccgtaatatccagctgaacggtctggttataggtacattgagcaactgactgaaatgcctcaaaatgttctttacgatgccattgggatatatcaacggtggtatatccagtgatttttttctccattttagcttccttagctcctgaaaatctcgataactcaaaaaatacgcccggtagtgatcttatttcattatggtgaaagttggaacctcttacgtgccgatcaacgtctcattttcgccaaaagttggcccagggcttcccggtatcaacagggacaccaggatttatttattctgcgaagtgatcttccgtcacaggtatttattcggcgcaaagtgcgtcgggtgatgctgccaacttactgatttagtgtatgatggtgtttttgaggtgctccagtggcttctgtttctatcagctgtccctcctgttcagctactgacggggtggtgcgtaacggcaaaagcaccgccggacatcagcgctagcggagtgtatactggcttactatgttggcactgatgagggtgtcagtgaagtgcttcatgtggcaggagaaaaaaggctgcaccggtgcgtcagcagaatatgtgatacaggatatattccgcttcctcgctcactgactcgctacgctcggtcgttcgactgcggcgagcggaaatggcttacgaacggggcggagatttcctggaagatgccaggaagatacttaacagggaagtgagagggccgcggcaaagccgtttttccataggctccgcccccctgacaagcatcacgaaatctgacgctcaaatcagtggtggcgaaacccgacaggactataaagataccaggcgtttccccctggcggctccctcgtgcgctctcctgttcctgcctttcggtttaccggtgtcattccgctgttatggccgcgtttgtctcattccacgcctgacactcagttccgggtaggcagttcgctccaagctggactgtatgcacgaaccccccgttcagtccgaccgctgcgccttatccggtaactatcgtcttgagtccaacccggaaagacatgcaaaagcaccactggcagcagccactggtaattgatttagaggagttagtcttgaagtcatgcgccggttaaggctaaactgaaaggacaagttttggtgactgcgctcctccaagccagttacctcggttcaaagagttggtagctcagagaaccttcgaaaaaccgccctgcaaggcggttttttcgttttcagagcaagagattacgcgcagaccaaaacgatctcaagaagatcatcttattaatcagataaaatatttctagatttcagtgcaatttatctcttcaaatgtagcacctgaagtcagccccatacgatataagttgtaattctcatgttagtcatgccccgcgcccaccggaaggagctgactgggttgaaggctctcaagggcatcggtcgagatcccggtgcctaatgagtgagctaacttacattaattgcgttgcgca

SEQ ID NO: 870 - DNA, 4522 bp, Synthetic construct
  source 1..4522: mol_type = other DNA
gctcatgttatgcatgtgcatgaaaaccactgcataaagcgggcaggcgtggcggggatacgagcgcgcgccatgtggtatggagattggatctattcataacttgatgtataaagtagaaaaaaaagcggggagattatgaataaaaaatttaccgatgagcagcaacaacagcttataggacatctcacaaagaaaggcttctatcgaggagctaatattaaaataaccatttttctatgtggtggtgacgttgctaatcatcaatcttggcgtcatcaattatcacaatttttagcaaagttcagtgatgttgatatattttatccagaagatctatttgatgatcttttggctggtcaagggcagcatagccttttaagtttagaaaatattctggctgaagctgtcgatgtaataattttatttcctgaaagtccggggtctttcacagagcttggtgcgttctctaataatgaaaacttaaggagaaagttgatttgcattcaagatgcaaaatttaaatcaaaacgtagctttattaactatggtcctgttcgcctgttgcgtaagtttaattcaaaatctgttttgcgttgtagttcaaatgaactaaaagaaatgtgtgattcatctattgatgttgccagaaaattacgattatataaaaaattaatggcatctattaagaaggttaggaaagaaaataaagtatcaaaagatattggaaatatattatacgcagagcggtttctattgccttgtatctatttactggatagtgtcaactaccgcacactgtgtgaactagcttttaaagcgataaagcaagatgatgttttatctaaaattattgttagatccgttgtttctcgtctaataaatgaacgaaaaatacttcaaatgactgatggttatcaggtcactgctttgggggctagctatgttaggagcgtctttgatagaaagacacttgaccgattgcggcttgagattatgaattttgaaaaccgtagaaaatcaacatttaactatgataagattccgtatgcgcacccttagcgagaggtttatcattaaggtcaacctctggatgttgtttcggcatcctgcattgaatctgagttactgtctgttttccttgttggaacggagagcatcgcctgatgctctccgagccaaccaggaaacccgttttttctgacgtaagggtgcgcaactttcatgaaatccgctgaatatttgaacacttttagattgagaaatctcggcctacctgtcatgaacaatttgcatgacatgtctaaggcgactcgcatatctgttgaaacacttcggttgttaatctatacagctgattttcgctataggatctacactgtagaaaagaaaggcccagagaagagaatgagaaccatttaccaaccttctcgagaacttaaagccttacaaggatgggttctacgtaacattttagataaactgtcgtcatctcctttttctattggatttgaaaagcaccaatctattttgaataatgctaccccgcatattggggcaaactttatactgaatattgatttggaggattttttcccaagtttaactgctaacaaagtttttggagtgttccattctcttggttataatcgactaatatcttcagttttgacaaaaatatgttgttataaaaatctgctaccacaaggtgctccatcatcacctaaattagctaatctaatatgttctaaacttgattatcgtattcagggttatgcaggtagtcggggcttgatatatacgagatatgccgatgatctcaccttatctgcacagtctatgaaaaaggttgttaaagcacgtgattttttattttctataatcccaagtgaaggattggttattaactcaaaaaaaacttgtattagtgggcctcgtagtcagaggaaagttacaggtttagttatttcacaagagaaagttgggataggtagagaaaaatataaagaaattagagcaaagatacatcatatattttgcggtaagtcttctgagatagaacacgttaggggatggttgtcatttattttaagtgtggattcaaaaagccataggagattaataacttatattagcaaattagaaaaaaaatatggaaagaaccctttaaataaagcgaagacctaatcgcaataactagcataaccccttggggcctctaaacgggtcttgaggggttttttgctgaaacctcaggcatttgagaagcacacggtcacactgcttccggtagtcaataaaccggtaaaccagcaatagacataagcggctatttaacgaccctgccctgaaccgacgaccgggtcgaatttgctttcgaatttctgccattcatccgcttattatcacttattcaggcgtagcaccaggcgtttaagggcaccaataactgccttaaaaaaattacgccccgccctgccactcatcgcaatactgttgtaattcatttaacattctgccgacatggaagccatcacagacggcatgatgaacctgaatcgccagcggcatcagcaccttgtcgccttgcgtataatatttgcccatagtgaaaacgggggcgaagaagttgtccatattggccacgtttaaatcaaaactggtgaaactcacccagggattggctgagacgaaaaacatattctcaataaaccctttagggaaataggccaggttttcaccgtaacacgccacatcttgcgaatatatgtgtagaaactgccggaaatcgtcgtggtattcactccagagcgatgaaaacgtttcagtttgctcatggaaaacggtgtaacaagggtgaacactatcccatatcaccagctcaccgtctttcatcgccatacggaactctggatgagcattcatcaggcgggcaagaatgtgaataaaggccggataaaacttgtgcttatttttctttacggtctttaaaaaggccgtaatatccagctgaacggtctggttataggtacattgagcaactgactgaaatgcctcaaaatgttctttacgatgccattgggatatatcaacggtggtatatccagtgatttttttctccattttagcttccttagctcctgaaaatctcgataactcaaaaaatacgcccggtagtgatcttatttcattatggtgaaagttggaacctcttacgtgccgatcaacgtctcattttcgccaaaagttggcccagggcttcccggtatcaacagggacaccaggatttatttattctgcgaagtgatcttccgtcacaggtatttattcggcgcaaagtgcgtcgggtgatgctgccaacttactgatttagtgtatgatggtgtttttgaggtgctccagtggcttctgtttctatcagctgtccctcctgttcagctactgacggggtggtgcgtaacggcaaaagcaccgccggacatcagcgctagcggagtgtatactggcttactatgttggcactgatgagggtgtcagtgaagtgcttcatgtggcaggagaaaaaaggctgcaccggtgcgtcagcagaatatgtgatacaggatatattccgcttcctcgctcactgactcgctacgctcggtcgttcgactgcggcgagcggaaatggcttacgaacggggcggagatttcctggaagatgccaggaagatacttaacagggaagtgagagggccgcggcaaagccgtttttccataggctccgcccccctgacaagcatcacgaaatctgacgctcaaatcagtggtggcgaaacccgacaggactataaagataccaggcgtttccccctggcggctccctcgtgcgctctcctgttcctgcctttcggtttaccggtgtcattccgctgttatggccgcgtttgtctcattccacgcctgacactcagttccgggtaggcagttcgctccaagctggactgtatgcacgaaccccccgttcagtccgaccgctgcgccttatccggtaactatcgtcttgagtccaacccggaaagacatgcaaaagcaccactggcagcagccactggtaattgatttagaggagttagtcttgaagtcatgcgccggttaaggctaaactgaaaggacaagttttggtgactgcgctcctccaagccagttacctcggttcaaagagttggtagctcagagaaccttcgaaaaaccgccctgcaaggcggttttttcgttttcagagcaagagattacgcgcagaccaaaacgatctcaagaagatcatcttattaatcagataaaatatttctagatttcagtgcaatttatctcttcaaatgtagcacctgaagtcagccccatacgatataagttgtaattctcatgttagtcatgccccgcgcccaccggaaggagctgactgggttgaaggctctcaagggcatcggtcgagatcccggtgcctaatgagtgagctaacttacattaattgcgttgcgca

SEQ ID NO: 871 - DNA, 4198 bp, Synthetic construct
  source 1..4198: mol_type = other DNA
acacgatataaaaccatctcattgcttgctgggttaactgagttgctgaatttttttctagaatttcgcaaaatttaataggtaaaccttgtttttttaaatttacgatgatataaaaataatgccctaaacaaaggtttaggggtattgtacaggttgtcaagcctcccacaggtcttggtgaaaccaatcactgtgacgacggtaagcaacacttggatgatattcataattgactccacgctactgattacattatacagcatatctaacatttgcggcgaggttcacaatttgtatttaggtactgattgtggatgagaaggttggagaaagaccacttggttaagccggaggatgtgtcctagaattgtcgctattctgtcatcctccggttttgctaatttcattcagggaatataatggactacaaagaccatgacggtgattataaagatcatgacatcgattacaaggatgacgatgacaagggaggaagcggatcgatgaataatgatgattacccatggttcagaaaacgtggttatttgcatttcgatgaacctgtttcattaaaaaaagcggttaaatatgtttcctctccagaaaaaataataaaacattcttttctgccatttttaagctttgaagtaaaatcgtttaaaatcaaaaaagacaaatcaacaaaacaattaagtaaaactgaaaaattaagacctattgcctattcctcacatttggatagtcatatttatgcattttacgcagaatatcttactggacattatgaattattgatccaagaaaacaatttacacgagaacatccttgccttcagatctttaaataaaagcaatatagaatttgccaagagagcatttgatacaattactgaaatgggtgagtgtagcgctgttgcattagatctttctggtttttttgacaatttagatcatcaaattttgaaacaccagtggtgcaaagttattgggactgaagcgttgccgcaagaccattttgccatatacaaaagtataacaagatattctaaagttgataaaaatagagcgtatgagattttaggtatatcaaagaataaccccaagtataatagacgcaagatctgcacccctgttgattttagaaataagattagaaaaaatggtcttattatagttaataattcccaaaaaggtataccccaaggctcgccaattagtgctctactttcaaatatatatatgcttgactttgatattgaaatgagagattacgcgcaggaacgtggtggccattattatcgctattgtgatgatatgctattcattgtaccaactaagtataataaaactctagcaggtgatgtagcccagcggattaagcatcttaaggtagaactcaatactaagaaaactgagattcgagattttatatacaaagacagtaccttagtggcaaatatgcctttacagtatcttgggtttatttttgatgggagtaatatattattacgttcatcttctctcgcaagatattcggaacgaatgaaaagaggtgtccgcttagcaaaagctacaatggacagcaagaataggattagagaaaataaaggtgaagctttaaaagctttatttaagaaaaaattatatgccagatattcacatattggaagaaggaattttttgacttatggttatcgcgccgcgaagatcatgaattcgaaagctataaaaagacagttaaaaccattgcagaaaagattggaaaatgaaatactaaaataaatatttgctggcccgaatcatacagggccacaatacagttgaaaacaagctataataaacaacatctaatttttatataccgcaataactagcataaccccttggggcctctaaacgggtcttgaggggttttttgctgaaacctcaggcatttgagaagcacacggtcacactgcttccggtagtcaataaaccggtaaaccagcaatagacataagcggctatttaacgaccctgccctgaaccgacgaccgggtcgaatttgctttcgaatttctgccattcatccgcttattatcacttattcaggcgtagcaccaggcgtttaagggcaccaataactgccttaaaaaaattacgccccgccctgccactcatcgcaatactgttgtaattcatttaacattctgccgacatggaagccatcacagacggcatgatgaacctgaatcgccagcggcatcagcaccttgtcgccttgcgtataatatttgcccatagtgaaaacgggggcgaagaagttgtccatattggccacgtttaaatcaaaactggtgaaactcacccagggattggctgagacgaaaaacatattctcaataaaccctttagggaaataggccaggttttcaccgtaacacgccacatcttgcgaatatatgtgtagaaactgccggaaatcgtcgtggtattcactccagagcgatgaaaacgtttcagtttgctcatggaaaacggtgtaacaagggtgaacactatcccatatcaccagctcaccgtctttcatcgccatacggaactctggatgagcattcatcaggcgggcaagaatgtgaataaaggccggataaaacttgtgcttatttttctttacggtctttaaaaaggccgtaatatccagctgaacggtctggttataggtacattgagcaactgactgaaatgcctcaaaatgttctttacgatgccattgggatatatcaacggtggtatatccagtgatttttttctccattttagcttccttagctcctgaaaatctcgataactcaaaaaatacgcccggtagtgatcttatttcattatggtgaaagttggaacctcttacgtgccgatcaacgtctcattttcgccaaaagttggcccagggcttcccggtatcaacagggacaccaggatttatttattctgcgaagtgatcttccgtcacaggtatttattcggcgcaaagtgcgtcgggtgatgctgccaacttactgatttagtgtatgatggtgtttttgaggtgctccagtggcttctgtttctatcagctgtccctcctgttcagctactgacggggtggtgcgtaacggcaaaagcaccgccggacatcagcgctagcggagtgtatactggcttactatgttggcactgatgagggtgtcagtgaagtgcttcatgtggcaggagaaaaaaggctgcaccggtgcgtcagcagaatatgtgatacaggatatattccgcttcctcgctcactgactcgctacgctcggtcgttcgactgcggcgagcggaaatggcttacgaacggggcggagatttcctggaagatgccaggaagatacttaacagggaagtgagagggccgcggcaaagccgtttttccataggctccgcccccctgacaagcatcacgaaatctgacgctcaaatcagtggtggcgaaacccgacaggactataaagataccaggcgtttccccctggcggctccctcgtgcgctctcctgttcctgcctttcggtttaccggtgtcattccgctgttatggccgcgtttgtctcattccacgcctgacactcagttccgggtaggcagttcgctccaagctggactgtatgcacgaaccccccgttcagtccgaccgctgcgccttatccggtaactatcgtcttgagtccaacccggaaagacatgcaaaagcaccactggcagcagccactggtaattgatttagaggagttagtcttgaagtcatgcgccggttaaggctaaactgaaaggacaagttttggtgactgcgctcctccaagccagttacctcggttcaaagagttggtagctcagagaaccttcgaaaaaccgccctgcaaggcggttttttcgttttcagagcaagagattacgcgcagaccaaaacgatctcaagaagatcatcttattaatcagataaaatatttctagatttcagtgcaatttatctcttcaaatgtagcacctgaagtcagccccatacgatataagttgtaattctcatgttagtcatgccccgcgcccaccggaaggagctgactgggttgaaggctctcaagggcatcggtcgagatcccggtgcctaatgagtgagctaacttacattaattgcgttgcgca

SEQ ID NO: 872 - DNA, 4198 bp, Synthetic construct
  source 1..4198: mol_type = other DNA
acacgatataaaaccatctcattgcttgctgggttaactgagttgctgaatttttttctagaatttcgcaaaatttaataggtaaaccttgtttttttaaatttacgatgatataaaaataatgccctaaacaaaggtttaggggtattgtacaggttgtcaagcctcccacaggtcttggtgaaaccaatcactgtgacgacggtaagcaacacttggatgatattcataattgactccacgctactgattacattatacagcatatctaacatttgcggcgaggttcacaatttgtatttaggtactgattgtggatgagaaggttggagaaagaccacttggttaagccggaggatgtgtcctagaattgtcgctattctgtcatcctccggttttgctaatttcattcagggaatataatggactacaaagaccatgacggtgattataaagatcatgacatcgattacaaggatgacgatgacaagggaggaagcggatcgatgaataatgatgattacccatggttcagaaaacgtggttatttgcatttcgatgaacctgtttcattaaaaaaagcggttaaatatgtttcctctccagaaaaaataataaaacattcttttctgccatttttaagctttgaagtaaaatcgtttaaaatcaaaaaagacaaatcaacaaaacaattaagtaaaactgaaaaattaagacctattgcctattcctcacatttggatagtcatatttatgcattttacgcagaatatcttactggacattatgaattattgatccaagaaaacaatttacacgagaacatccttgccttcagatctttaaataaaagcaatatagaatttgccaagagagcatttgatacaattactgaaatgggtgagtgtagcgctgttgcattagatctttctggtttttttgacaatttagatcatcaaattttgaaacaccagtggtgcaaagttattgggactgaagcgttgccgcaagaccattttgccatatacaaaagtataacaagatattctaaagttgataaaaatagagcgtatgagattttaggtatatcaaagaataaccccaagtataatagacgcaagatctgcacccctgttgattttagaaataagattagaaaaaatggtcttattatagttaataattcccaaaaaggtataccccaaggctcgccaattagtgctctactttcaaatatatatatgcttgactttgatattgaaatgagagattacgcgcaggaacgtggtggccattattatcgctattgtgctgctatgctattcattgtaccaactaagtataataaaactctagcaggtgatgtagcccagcggattaagcatcttaaggtagaactcaatactaagaaaactgagattcgagattttatatacaaagacagtaccttagtggcaaatatgcctttacagtatcttgggtttatttttgatgggagtaatatattattacgttcatcttctctcgcaagatattcggaacgaatgaaaagaggtgtccgcttagcaaaagctacaatggacagcaagaataggattagagaaaataaaggtgaagctttaaaagctttatttaagaaaaaattatatgccagatattcacatattggaagaaggaattttttgacttatggttatcgcgccgcgaagatcatgaattcgaaagctataaaaagacagttaaaaccattgcagaaaagattggaaaatgaaatactaaaataaatatttgctggcccgaatcatacagggccacaatacagttgaaaacaagctataataaacaacatctaatttttatataccgcaataactagcataaccccttggggcctctaaacgggtcttgaggggttttttgctgaaacctcaggcatttgagaagcacacggtcacactgcttccggtagtcaataaaccggtaaaccagcaatagacataagcggctatttaacgaccctgccctgaaccgacgaccgggtcgaatttgctttcgaatttctgccattcatccgcttattatcacttattcaggcgtagcaccaggcgtttaagggcaccaataactgccttaaaaaaattacgccccgccctgccactcatcgcaatactgttgtaattcatttaacattctgccgacatggaagccatcacagacggcatgatgaacctgaatcgccagcggcatcagcaccttgtcgccttgcgtataatatttgcccatagtgaaaacgggggcgaagaagttgtccatattggccacgtttaaatcaaaactggtgaaactcacccagggattggctgagacgaaaaacatattctcaataaaccctttagggaaataggccaggttttcaccgtaacacgccacatcttgcgaatatatgtgtagaaactgccggaaatcgtcgtggtattcactccagagcgatgaaaacgtttcagtttgctcatggaaaacggtgtaacaagggtgaacactatcccatatcaccagctcaccgtctttcatcgccatacggaactctggatgagcattcatcaggcgggcaagaatgtgaataaaggccggataaaacttgtgcttatttttctttacggtctttaaaaaggccgtaatatccagctgaacggtctggttataggtacattgagcaactgactgaaatgcctcaaaatgttctttacgatgccattgggatatatcaacggtggtatatccagtgatttttttctccattttagcttccttagctcctgaaaatctcgataactcaaaaaatacgcccggtagtgatcttatttcattatggtgaaagttggaacctcttacgtgccgatcaacgtctcattttcgccaaaagttggcccagggcttcccggtatcaacagggacaccaggatttatttattctgcgaagtgatcttccgtcacaggtatttattcggcgcaaagtgcgtcgggtgatgctgccaacttactgatttagtgtatgatggtgtttttgaggtgctccagtggcttctgtttctatcagctgtccctcctgttcagctactgacggggtggtgcgtaacggcaaaagcaccgccggacatcagcgctagcggagtgtatactggcttactatgttggcactgatgagggtgtcagtgaagtgcttcatgtggcaggagaaaaaaggctgcaccggtgcgtcagcagaatatgtgatacaggatatattccgcttcctcgctcactgactcgctacgctcggtcgttcgactgcggcgagcggaaatggcttacgaacggggcggagatttcctggaagatgccaggaagatacttaacagggaagtgagagggccgcggcaaagccgtttttccataggctccgcccccctgacaagcatcacgaaatctgacgctcaaatcagtggtggcgaaacccgacaggactataaagataccaggcgtttccccctggcggctccctcgtgcgctctcctgttcctgcctttcggtttaccggtgtcattccgctgttatggccgcgtttgtctcattccacgcctgacactcagttccgggtaggcagttcgctccaagctggactgtatgcacgaaccccccgttcagtccgaccgctgcgccttatccggtaactatcgtcttgagtccaacccggaaagacatgcaaaagcaccactggcagcagccactggtaattgatttagaggagttagtcttgaagtcatgcgccggttaaggctaaactgaaaggacaagttttggtgactgcgctcctccaagccagttacctcggttcaaagagttggtagctcagagaaccttcgaaaaaccgccctgcaaggcggttttttcgttttcagagcaagagattacgcgcagaccaaaacgatctcaagaagatcatcttattaatcagataaaatatttctagatttcagtgcaatttatctcttcaaatgtagcacctgaagtcagccccatacgatataagttgtaattctcatgttagtcatgccccgcgcccaccggaaggagctgactgggttgaaggctctcaagggcatcggtcgagatcccggtgcctaatgagtgagctaacttacattaattgcgttgcgca

SEQ ID NO: 873 - DNA, 4606 bp, Synthetic construct
  source 1..4606: mol_type = other DNA
gctcatgttatgcatgtgcatgaaaaccactgcataaagcgggcaggcgtggcggggatacgagcgcgcgccatgtggtatggagattggatctattcataacttgatgtataaagtagaaaaaaaagcggggagattatgaataaaaaatttaccgatgagcagcaacaacagcttataggacatctcacaaagaaaggcttctatcgaggagctaatattaaaataaccatttttctatgtggtggtgacgttgctaatcatcaatcttggcgtcatcaattatcacaatttttagcaaagttcagtgatgttgatatattttatccagaagatctatttgatgatcttttggctggtcaagggcagcatagccttttaagtttagaaaatattctggctgaagctgtcgatgtaataattttatttcctgaaagtccggggtctttcacagagcttggtgcgttctctaataatgaaaacttaaggagaaagttgatttgcattcaagatgcaaaatttaaatcaaaacgtagctttattaactatggtcctgttcgcctgttgcgtaagtttaattcaaaatctgttttgcgttgtagttcaaatgaactaaaagaaatgtgtgattcatctattgatgttgccagaaaattacgattatataaaaaattaatggcatctattaagaaggttaggaaagaaaataaagtatcaaaagatattggaaatatattatacgcagagcggtttctattgccttgtatctatttactggatagtgtcaactaccgcacactgtgtgaactagcttttaaagcgataaagcaagatgatgttttatctaaaattattgttagatccgttgtttctcgtctaataaatgaacgaaaaatacttcaaatgactgatggttatcaggtcactgctttgggggctagctatgttaggagcgtctttgatagaaagacacttgaccgattgcggcttgagattatgaattttgaaaaccgtagaaaatcaacatttaactatgataagattccgtatgcgcacccttagcgagaggtttatcattaaggtcaacctctggatgttgtttcggcatcctgcattgaatctgagttactgtctgttttccttgttggaacggagagcatcgcctgatgctctccgagccaaccaggaaacccgttttttctgacgtaagggtgcgcaactttcatgaaatccgctgaatatttgaacacttttagattgagaaatctcggcctacctgtcatgaacaatttgcatgacatgtctaaggcgactcgcatatctgttgaaacacttcggttgttaatctatacagctgattttcgctataggatctacactgtagaaaagaaaggcccagagaagagaatgagaaccatttaccaaccttctcgagaacttaaagccttacaaggatgggttctacgtaacattttagataaactgtcgtcatctcctttttctattggatttgaaaagcaccaatctattttgaataatgctaccccgcatattggggcaaactttatactgaatattgatttggaggattttttcccaagtttaactgctaacaaagtttttggagtgttccattctcttggttataatcgactaatatcttcagttttgacaaaaatatgttgttataaaaatctgctaccacaaggtgctccatcatcacctaaattagctaatctaatatgttctaaacttgattatcgtattcagggttatgcaggtagtcggggcttgatatatacgagatatgccgatgatctcaccttatctgcacagtctatgaaaaaggttgttaaagcacgtgattttttattttctataatcccaagtgaaggattggttattaactcaaaaaaaacttgtattagtgggcctcgtagtcagaggaaagttacaggtttagttatttcacaagagaaagttgggataggtagagaaaaatataaagaaattagagcaaagatacatcatatattttgcggtaagtcttctgagatagaacacgttaggggatggttgtcatttattttaagtgtggattcaaaaagccataggagattaataacttatattagcaaattagaaaaaaaatatggaaagaaccctttaaataaagcgaagaccggaggaagcggatcgatggactacaaagaccatgacggtgattataaagatcatgacatcgattacaaggatgacgatgacaagtaatcgcaataactagcataaccccttggggcctctaaacgggtcttgaggggttttttgctgaaacctcaggcatttgagaagcacacggtcacactgcttccggtagtcaataaaccggtaaaccagcaatagacataagcggctatttaacgaccctgccctgaaccgacgaccgggtcgaatttgctttcgaatttctgccattcatccgcttattatcacttattcaggcgtagcaccaggcgtttaagggcaccaataactgccttaaaaaaattacgccccgccctgccactcatcgcaatactgttgtaattcatttaacattctgccgacatggaagccatcacagacggcatgatgaacctgaatcgccagcggcatcagcaccttgtcgccttgcgtataatatttgcccatagtgaaaacgggggcgaagaagttgtccatattggccacgtttaaatcaaaactggtgaaactcacccagggattggctgagacgaaaaacatattctcaataaaccctttagggaaataggccaggttttcaccgtaacacgccacatcttgcgaatatatgtgtagaaactgccggaaatcgtcgtggtattcactccagagcgatgaaaacgtttcagtttgctcatggaaaacggtgtaacaagggtgaacactatcccatatcaccagctcaccgtctttcatcgccatacggaactctggatgagcattcatcaggcgggcaagaatgtgaataaaggccggataaaacttgtgcttatttttctttacggtctttaaaaaggccgtaatatccagctgaacggtctggttataggtacattgagcaactgactgaaatgcctcaaaatgttctttacgatgccattgggatatatcaacggtggtatatccagtgatttttttctccattttagcttccttagctcctgaaaatctcgataactcaaaaaatacgcccggtagtgatcttatttcattatggtgaaagttggaacctcttacgtgccgatcaacgtctcattttcgccaaaagttggcccagggcttcccggtatcaacagggacaccaggatttatttattctgcgaagtgatcttccgtcacaggtatttattcggcgcaaagtgcgtcgggtgatgctgccaacttactgatttagtgtatgatggtgtttttgaggtgctccagtggcttctgtttctatcagctgtccctcctgttcagctactgacggggtggtgcgtaacggcaaaagcaccgccggacatcagcgctagcggagtgtatactggcttactatgttggcactgatgagggtgtcagtgaagtgcttcatgtggcaggagaaaaaaggctgcaccggtgcgtcagcagaatatgtgatacaggatatattccgcttcctcgctcactgactcgctacgctcggtcgttcgactgcggcgagcggaaatggcttacgaacggggcggagatttcctggaagatgccaggaagatacttaacagggaagtgagagggccgcggcaaagccgtttttccataggctccgcccccctgacaagcatcacgaaatctgacgctcaaatcagtggtggcgaaacccgacaggactataaagataccaggcgtttccccctggcggctccctcgtgcgctctcctgttcctgcctttcggtttaccggtgtcattccgctgttatggccgcgtttgtctcattccacgcctgacactcagttccgggtaggcagttcgctccaagctggactgtatgcacgaaccccccgttcagtccgaccgctgcgccttatccggtaactatcgtcttgagtccaacccggaaagacatgcaaaagcaccactggcagcagccactggtaattgatttagaggagttagtcttgaagtcatgcgccggttaaggctaaactgaaaggacaagttttggtgactgcgctcctccaagccagttacctcggttcaaagagttggtagctcagagaaccttcgaaaaaccgccctgcaaggcggttttttcgttttcagagcaagagattacgcgcagaccaaaacgatctcaagaagatcatcttattaatcagataaaatatttctagatttcagtgcaatttatctcttcaaatgtagcacctgaagtcagccccatacgatataagttgtaattctcatgttagtcatgccccgcgcccaccggaaggagctgactgggttgaaggctctcaagggcatcggtcgagatcccggtgcctaatgagtgagctaacttacattaattgcgttgcgca

SEQ ID NO: 874 - DNA, 4198 bp, Synthetic construct
  source 1..4198: mol_type = other DNA
acacgatataaaaccatctcattgcttgctgggttaactgagttgctgaatttttttctagaatttcgcaaaatttaataggtaaaccttgtttttttaaatttacgatgatataaaaataatgtatgagagccaattaggccagtattgtacaggttgtcaagcctcccacaggtcttggtgaaaccaatcactgtgacgacggtaagcaacacttggatgatattcataattgactccacgctactgattacattatacagcatatctaacatttgcggcgaggttcacaatttgtatttaggtactgattgtggatgagaaggttggagaaagaccacttggttaagccggaggatgtgtcctagaattgtcgctattctgtcatcctccggttttgctaatttcattcagggaatataatggactacaaagaccatgacggtgattataaagatcatgacatcgattacaaggatgacgatgacaagggaggaagcggatcgatgaataatgatgattacccatggttcagaaaacgtggttatttgcatttcgatgaacctgtttcattaaaaaaagcggttaaatatgtttcctctccagaaaaaataataaaacattcttttctgccatttttaagctttgaagtaaaatcgtttaaaatcaaaaaagacaaatcaacaaaacaattaagtaaaactgaaaaattaagacctattgcctattcctcacatttggatagtcatatttatgcattttacgcagaatatcttactggacattatgaattattgatccaagaaaacaatttacacgagaacatccttgccttcagatctttaaataaaagcaatatagaatttgccaagagagcatttgatacaattactgaaatgggtgagtgtagcgctgttgcattagatctttctggtttttttgacaatttagatcatcaaattttgaaacaccagtggtgcaaagttattgggactgaagcgttgccgcaagaccattttgccatatacaaaagtataacaagatattctaaagttgataaaaatagagcgtatgagattttaggtatatcaaagaataaccccaagtataatagacgcaagatctgcacccctgttgattttagaaataagattagaaaaaatggtcttattatagttaataattcccaaaaaggtataccccaaggctcgccaattagtgctctactttcaaatatatatatgcttgactttgatattgaaatgagagattacgcgcaggaacgtggtggccattattatcgctattgtgatgatatgctattcattgtaccaactaagtataataaaactctagcaggtgatgtagcccagcggattaagcatcttaaggtagaactcaatactaagaaaactgagattcgagattttatatacaaagacagtaccttagtggcaaatatgcctttacagtatcttgggtttatttttgatgggagtaatatattattacgttcatcttctctcgcaagatattcggaacgaatgaaaagaggtgtccgcttagcaaaagctacaatggacagcaagaataggattagagaaaataaaggtgaagctttaaaagctttatttaagaaaaaattatatgccagatattcacatattggaagaaggaattttttgacttatggttatcgcgccgcgaagatcatgaattcgaaagctataaaaagacagttaaaaccattgcagaaaagattggaaaatgaaatactaaaataaatatttgctggcccgaatcatacagggccacaatacagttgaaaacaagctataataaacaacatctaatttttatataccgcaataactagcataaccccttggggcctctaaacgggtcttgaggggttttttgctgaaacctcaggcatttgagaagcacacggtcacactgcttccggtagtcaataaaccggtaaaccagcaatagacataagcggctatttaacgaccctgccctgaaccgacgaccgggtcgaatttgctttcgaatttctgccattcatccgcttattatcacttattcaggcgtagcaccaggcgtttaagggcaccaataactgccttaaaaaaattacgccccgccctgccactcatcgcaatactgttgtaattcatttaacattctgccgacatggaagccatcacagacggcatgatgaacctgaatcgccagcggcatcagcaccttgtcgccttgcgtataatatttgcccatagtgaaaacgggggcgaagaagttgtccatattggccacgtttaaatcaaaactggtgaaactcacccagggattggctgagacgaaaaacatattctcaataaaccctttagggaaataggccaggttttcaccgtaacacgccacatcttgcgaatatatgtgtagaaactgccggaaatcgtcgtggtattcactccagagcgatgaaaacgtttcagtttgctcatggaaaacggtgtaacaagggtgaacactatcccatatcaccagctcaccgtctttcatcgccatacggaactctggatgagcattcatcaggcgggcaagaatgtgaataaaggccggataaaacttgtgcttatttttctttacggtctttaaaaaggccgtaatatccagctgaacggtctggttataggtacattgagcaactgactgaaatgcctcaaaatgttctttacgatgccattgggatatatcaacggtggtatatccagtgatttttttctccattttagcttccttagctcctgaaaatctcgataactcaaaaaatacgcccggtagtgatcttatttcattatggtgaaagttggaacctcttacgtgccgatcaacgtctcattttcgccaaaagttggcccagggcttcccggtatcaacagggacaccaggatttatttattctgcgaagtgatcttccgtcacaggtatttattcggcgcaaagtgcgtcgggtgatgctgccaacttactgatttagtgtatgatggtgtttttgaggtgctccagtggcttctgtttctatcagctgtccctcctgttcagctactgacggggtggtgcgtaacggcaaaagcaccgccggacatcagcgctagcggagtgtatactggcttactatgttggcactgatgagggtgtcagtgaagtgcttcatgtggcaggagaaaaaaggctgcaccggtgcgtcagcagaatatgtgatacaggatatattccgcttcctcgctcactgactcgctacgctcggtcgttcgactgcggcgagcggaaatggcttacgaacggggcggagatttcctggaagatgccaggaagatacttaacagggaagtgagagggccgcggcaaagccgtttttccataggctccgcccccctgacaagcatcacgaaatctgacgctcaaatcagtggtggcgaaacccgacaggactataaagataccaggcgtttccccctggcggctccctcgtgcgctctcctgttcctgcctttcggtttaccggtgtcattccgctgttatggccgcgtttgtctcattccacgcctgacactcagttccgggtaggcagttcgctccaagctggactgtatgcacgaaccccccgttcagtccgaccgctgcgccttatccggtaactatcgtcttgagtccaacccggaaagacatgcaaaagcaccactggcagcagccactggtaattgatttagaggagttagtcttgaagtcatgcgccggttaaggctaaactgaaaggacaagttttggtgactgcgctcctccaagccagttacctcggttcaaagagttggtagctcagagaaccttcgaaaaaccgccctgcaaggcggttttttcgttttcagagcaagagattacgcgcagaccaaaacgatctcaagaagatcatcttattaatcagataaaatatttctagatttcagtgcaatttatctcttcaaatgtagcacctgaagtcagccccatacgatataagttgtaattctcatgttagtcatgccccgcgcccaccggaaggagctgactgggttgaaggctctcaagggcatcggtcgagatcccggtgcctaatgagtgagctaacttacattaattgcgttgcgca

SEQ ID NO: 875 - DNA, 4198 bp, Synthetic construct
  source 1..4198: mol_type = other DNA
acacgatataaaaccatctcattgcttgctgggttaactgagttgctgaatttttttctagaatttcgcaaaatttaataggtaaaccttgtttttttaaatttacgatgatataaaaataatgccctaaacaaaggtttaggggtattgtacaggttgtcaagcctcccacaggtcttggtgaaaccaatcactgtgacgacggtaagcaacacttggatgatattcataattgactccacgctactgattacattatacagcatatctacgctttgcggcgaggttcacaatttgtatttaggtactgattgtggatgagaaggttggagaaagaccacttggttaagccggaggatgtgtcctagaattgtcgctattctgtcatcctccggttttgctaatttcattcagggaatataatggactacaaagaccatgacggtgattataaagatcatgacatcgattacaaggatgacgatgacaagggaggaagcggatcgatgaataatgatgattacccatggttcagaaaacgtggttatttgcatttcgatgaacctgtttcattaaaaaaagcggttaaatatgtttcctctccagaaaaaataataaaacattcttttctgccatttttaagctttgaagtaaaatcgtttaaaatcaaaaaagacaaatcaacaaaacaattaagtaaaactgaaaaattaagacctattgcctattcctcacatttggatagtcatatttatgcattttacgcagaatatcttactggacattatgaattattgatccaagaaaacaatttacacgagaacatccttgccttcagatctttaaataaaagcaatatagaatttgccaagagagcatttgatacaattactgaaatgggtgagtgtagcgctgttgcattagatctttctggtttttttgacaatttagatcatcaaattttgaaacaccagtggtgcaaagttattgggactgaagcgttgccgcaagaccattttgccatatacaaaagtataacaagatattctaaagttgataaaaatagagcgtatgagattttaggtatatcaaagaataaccccaagtataatagacgcaagatctgcacccctgttgattttagaaataagattagaaaaaatggtcttattatagttaataattcccaaaaaggtataccccaaggctcgccaattagtgctctactttcaaatatatatatgcttgactttgatattgaaatgagagattacgcgcaggaacgtggtggccattattatcgctattgtgatgatatgctattcattgtaccaactaagtataataaaactctagcaggtgatgtagcccagcggattaagcatcttaaggtagaactcaatactaagaaaactgagattcgagattttatatacaaagacagtaccttagtggcaaatatgcctttacagtatcttgggtttatttttgatgggagtaatatattattacgttcatcttctctcgcaagatattcggaacgaatgaaaagaggtgtccgcttagcaaaagctacaatggacagcaagaataggattagagaaaataaaggtgaagctttaaaagctttatttaagaaaaaattatatgccagatattcacatattggaagaaggaattttttgacttatggttatcgcgccgcgaagatcatgaattcgaaagctataaaaagacagttaaaaccattgcagaaaagattggaaaatgaaatactaaaataaatatttgctggcccgaatcatacagggccacaatacagttgaaaacaagctataataaacaacatctaatttttatataccgcaataactagcataaccccttggggcctctaaacgggtcttgaggggttttttgctgaaacctcaggcatttgagaagcacacggtcacactgcttccggtagtcaataaaccggtaaaccagcaatagacataagcggctatttaacgaccctgccctgaaccgacgaccgggtcgaatttgctttcgaatttctgccattcatccgcttattatcacttattcaggcgtagcaccaggcgtttaagggcaccaataactgccttaaaaaaattacgccccgccctgccactcatcgcaatactgttgtaattcatttaacattctgccgacatggaagccatcacagacggcatgatgaacctgaatcgccagcggcatcagcaccttgtcgccttgcgtataatatttgcccatagtgaaaacgggggcgaagaagttgtccatattggccacgtttaaatcaaaactggtgaaactcacccagggattggctgagacgaaaaacatattctcaataaaccctttagggaaataggccaggttttcaccgtaacacgccacatcttgcgaatatatgtgtagaaactgccggaaatcgtcgtggtattcactccagagcgatgaaaacgtttcagtttgctcatggaaaacggtgtaacaagggtgaacactatcccatatcaccagctcaccgtctttcatcgccatacggaactctggatgagcattcatcaggcgggcaagaatgtgaataaaggccggataaaacttgtgcttatttttctttacggtctttaaaaaggccgtaatatccagctgaacggtctggttataggtacattgagcaactgactgaaatgcctcaaaatgttctttacgatgccattgggatatatcaacggtggtatatccagtgatttttttctccattttagcttccttagctcctgaaaatctcgataactcaaaaaatacgcccggtagtgatcttatttcattatggtgaaagttggaacctcttacgtgccgatcaacgtctcattttcgccaaaagttggcccagggcttcccggtatcaacagggacaccaggatttatttattctgcgaagtgatcttccgtcacaggtatttattcggcgcaaagtgcgtcgggtgatgctgccaacttactgatttagtgtatgatggtgtttttgaggtgctccagtggcttctgtttctatcagctgtccctcctgttcagctactgacggggtggtgcgtaacggcaaaagcaccgccggacatcagcgctagcggagtgtatactggcttactatgttggcactgatgagggtgtcagtgaagtgcttcatgtggcaggagaaaaaaggctgcaccggtgcgtcagcagaatatgtgatacaggatatattccgcttcctcgctcactgactcgctacgctcggtcgttcgactgcggcgagcggaaatggcttacgaacggggcggagatttcctggaagatgccaggaagatacttaacagggaagtgagagggccgcggcaaagccgtttttccataggctccgcccccctgacaagcatcacgaaatctgacgctcaaatcagtggtggcgaaacccgacaggactataaagataccaggcgtttccccctggcggctccctcgtgcgctctcctgttcctgcctttcggtttaccggtgtcattccgctgttatggccgcgtttgtctcattccacgcctgacactcagttccgggtaggcagttcgctccaagctggactgtatgcacgaaccccccgttcagtccgaccgctgcgccttatccggtaactatcgtcttgagtccaacccggaaagacatgcaaaagcaccactggcagcagccactggtaattgatttagaggagttagtcttgaagtcatgcgccggttaaggctaaactgaaaggacaagttttggtgactgcgctcctccaagccagttacctcggttcaaagagttggtagctcagagaaccttcgaaaaaccgccctgcaaggcggttttttcgttttcagagcaagagattacgcgcagaccaaaacgatctcaagaagatcatcttattaatcagataaaatatttctagatttcagtgcaatttatctcttcaaatgtagcacctgaagtcagccccatacgatataagttgtaattctcatgttagtcatgccccgcgcccaccggaaggagctgactgggttgaaggctctcaagggcatcggtcgagatcccggtgcctaatgagtgagctaacttacattaattgcgttgcgca

SEQ ID NO: 876 - DNA, 4114 bp, Synthetic construct
  source 1..4114: mol_type = other DNA
acacgatataaaaccatctcattgcttgctgggttaactgagttgctgaatttttttctagaatttcgcaaaatttaataggtaaaccttgtttttttaaatttacgatgatataaaaataatgccctaaacaaaggtttaggggtattccacaggttgtcaagcctcccacaggtcttggtgaaaccaatcactgtgacgacggtaagcaacacttggatgatattcataattgactccacgctactgattacattatacagcatatctaacatttgcggcgaggttcacaatttgtatttaggtactgattgtggatgagaaggttggagaaagaccacttggttaagccggaggatgtgtcctagaattgtcgctattctgtcatcctccggttttgctaatttcattcagggaatataatgaataatgatgattacccatggttcagaaaacgtggttatttgcatttcgatgaacctgtttcattaaaaaaagcggttaaatatgtttcctctccagaaaaaataataaaacattcttttctgccatttttaagctttgaagtaaaatcgtttaaaatcaaaaaagacaaatcaacaaaacaattaagtaaaactgaaaaattaagacctattgcctattcctcacatttggatagtcatatttatgcattttacgcagaatatcttactggacattatgaattattgatccaagaaaacaatttacacgagaacatccttgccttcagatctttaaataaaagcaatatagaatttgccaagagagcatttgatacaattactgaaatgggtgagtgtagcgctgttgcattagatctttctggtttttttgacaatttagatcatcaaattttgaaacaccagtggtgcaaagttattgggactgaagcgttgccgcaagaccattttgccatatacaaaagtataacaagatattctaaagttgataaaaatagagcgtatgagattttaggtatatcaaagaataaccccaagtataatagacgcaagatctgcacccctgttgattttagaaataagattagaaaaaatggtcttattatagttaataattcccaaaaaggtataccccaaggctcgccaattagtgctctactttcaaatatatatatgcttgactttgatattgaaatgagagattacgcgcaggaacgtggtggccattattatcgctattgtgatgatatgctattcattgtaccaactaagtataataaaactctagcaggtgatgtagcccagcggattaagcatcttaaggtagaactcaatactaagaaaactgagattcgagattttatatacaaagacagtaccttagtggcaaatatgcctttacagtatcttgggtttatttttgatgggagtaatatattattacgttcatcttctctcgcaagatattcggaacgaatgaaaagaggtgtccgcttagcaaaagctacaatggacagcaagaataggattagagaaaataaaggtgaagctttaaaagctttatttaagaaaaaattatatgccagatattcacatattggaagaaggaattttttgacttatggttatcgcgccgcgaagatcatgaattcgaaagctataaaaagacagttaaaaccattgcagaaaagattggaaaatgaaatactaaaataaatatttgctggcccgaatcatacagggccacaatacagttgaaaacaagctataataaacaacatctaatttttatataccgcaataactagcataaccccttggggcctctaaacgggtcttgaggggttttttgctgaaacctcaggcatttgagaagcacacggtcacactgcttccggtagtcaataaaccggtaaaccagcaatagacataagcggctatttaacgaccctgccctgaaccgacgaccgggtcgaatttgctttcgaatttctgccattcatccgcttattatcacttattcaggcgtagcaccaggcgtttaagggcaccaataactgccttaaaaaaattacgccccgccctgccactcatcgcaatactgttgtaattcatttaacattctgccgacatggaagccatcacagacggcatgatgaacctgaatcgccagcggcatcagcaccttgtcgccttgcgtataatatttgcccatagtgaaaacgggggcgaagaagttgtccatattggccacgtttaaatcaaaactggtgaaactcacccagggattggctgagacgaaaaacatattctcaataaaccctttagggaaataggccaggttttcaccgtaacacgccacatcttgcgaatatatgtgtagaaactgccggaaatcgtcgtggtattcactccagagcgatgaaaacgtttcagtttgctcatggaaaacggtgtaacaagggtgaacactatcccatatcaccagctcaccgtctttcatcgccatacggaactctggatgagcattcatcaggcgggcaagaatgtgaataaaggccggataaaacttgtgcttatttttctttacggtctttaaaaaggccgtaatatccagctgaacggtctggttataggtacattgagcaactgactgaaatgcctcaaaatgttctttacgatgccattgggatatatcaacggtggtatatccagtgatttttttctccattttagcttccttagctcctgaaaatctcgataactcaaaaaatacgcccggtagtgatcttatttcattatggtgaaagttggaacctcttacgtgccgatcaacgtctcattttcgccaaaagttggcccagggcttcccggtatcaacagggacaccaggatttatttattctgcgaagtgatcttccgtcacaggtatttattcggcgcaaagtgcgtcgggtgatgctgccaacttactgatttagtgtatgatggtgtttttgaggtgctccagtggcttctgtttctatcagctgtccctcctgttcagctactgacggggtggtgcgtaacggcaaaagcaccgccggacatcagcgctagcggagtgtatactggcttactatgttggcactgatgagggtgtcagtgaagtgcttcatgtggcaggagaaaaaaggctgcaccggtgcgtcagcagaatatgtgatacaggatatattccgcttcctcgctcactgactcgctacgctcggtcgttcgactgcggcgagcggaaatggcttacgaacggggcggagatttcctggaagatgccaggaagatacttaacagggaagtgagagggccgcggcaaagccgtttttccataggctccgcccccctgacaagcatcacgaaatctgacgctcaaatcagtggtggcgaaacccgacaggactataaagataccaggcgtttccccctggcggctccctcgtgcgctctcctgttcctgcctttcggtttaccggtgtcattccgctgttatggccgcgtttgtctcattccacgcctgacactcagttccgggtaggcagttcgctccaagctggactgtatgcacgaaccccccgttcagtccgaccgctgcgccttatccggtaactatcgtcttgagtccaacccggaaagacatgcaaaagcaccactggcagcagccactggtaattgatttagaggagttagtcttgaagtcatgcgccggttaaggctaaactgaaaggacaagttttggtgactgcgctcctccaagccagttacctcggttcaaagagttggtagctcagagaaccttcgaaaaaccgccctgcaaggcggttttttcgttttcagagcaagagattacgcgcagaccaaaacgatctcaagaagatcatcttattaatcagataaaatatttctagatttcagtgcaatttatctcttcaaatgtagcacctgaagtcagccccatacgatataagttgtaattctcatgttagtcatgccccgcgcccaccggaaggagctgactgggttgaaggctctcaagggcatcggtcgagatcccggtgcctaatgagtgagctaacttacattaattgcgttgcgca

SEQ ID NO: 877 - DNA, 4114 bp, Synthetic construct
  source 1..4114: mol_type = other DNA
acacgatataaaaccatctcattgcttgctgggttaactgagttgctgaatttttttctagaatttcgcaaaatttaataggtaaaccttgtttttttaaatttacgatgatataaaaataatgccctaaacaaaggtttaggggtattgtggaggttgtcaagcctcccacaggtcttggtgaaaccaatcactgtgacgacggtaagcaacacttggatgatattcataattgactccacgctactgattacattatacagcatatctaacatttgcggcgaggttcacaatttgtatttaggtactgattgtggatgagaaggttggagaaagaccacttggttaagccggaggatgtgtcctagaattgtcgctattctgtcatcctccggttttgctaatttcattcagggaatataatgaataatgatgattacccatggttcagaaaacgtggttatttgcatttcgatgaacctgtttcattaaaaaaagcggttaaatatgtttcctctccagaaaaaataataaaacattcttttctgccatttttaagctttgaagtaaaatcgtttaaaatcaaaaaagacaaatcaacaaaacaattaagtaaaactgaaaaattaagacctattgcctattcctcacatttggatagtcatatttatgcattttacgcagaatatcttactggacattatgaattattgatccaagaaaacaatttacacgagaacatccttgccttcagatctttaaataaaagcaatatagaatttgccaagagagcatttgatacaattactgaaatgggtgagtgtagcgctgttgcattagatctttctggtttttttgacaatttagatcatcaaattttgaaacaccagtggtgcaaagttattgggactgaagcgttgccgcaagaccattttgccatatacaaaagtataacaagatattctaaagttgataaaaatagagcgtatgagattttaggtatatcaaagaataaccccaagtataatagacgcaagatctgcacccctgttgattttagaaataagattagaaaaaatggtcttattatagttaataattcccaaaaaggtataccccaaggctcgccaattagtgctctactttcaaatatatatatgcttgactttgatattgaaatgagagattacgcgcaggaacgtggtggccattattatcgctattgtgatgatatgctattcattgtaccaactaagtataataaaactctagcaggtgatgtagcccagcggattaagcatcttaaggtagaactcaatactaagaaaactgagattcgagattttatatacaaagacagtaccttagtggcaaatatgcctttacagtatcttgggtttatttttgatgggagtaatatattattacgttcatcttctctcgcaagatattcggaacgaatgaaaagaggtgtccgcttagcaaaagctacaatggacagcaagaataggattagagaaaataaaggtgaagctttaaaagctttatttaagaaaaaattatatgccagatattcacatattggaagaaggaattttttgacttatggttatcgcgccgcgaagatcatgaattcgaaagctataaaaagacagttaaaaccattgcagaaaagattggaaaatgaaatactaaaataaatatttgctggcccgaatcatacagggccacaatacagttgaaaacaagctataataaacaacatctaatttttatataccgcaataactagcataaccccttggggcctctaaacgggtcttgaggggttttttgctgaaacctcaggcatttgagaagcacacggtcacactgcttccggtagtcaataaaccggtaaaccagcaatagacataagcggctatttaacgaccctgccctgaaccgacgaccgggtcgaatttgctttcgaatttctgccattcatccgcttattatcacttattcaggcgtagcaccaggcgtttaagggcaccaataactgccttaaaaaaattacgccccgccctgccactcatcgcaatactgttgtaattcatttaacattctgccgacatggaagccatcacagacggcatgatgaacctgaatcgccagcggcatcagcaccttgtcgccttgcgtataatatttgcccatagtgaaaacgggggcgaagaagttgtccatattggccacgtttaaatcaaaactggtgaaactcacccagggattggctgagacgaaaaacatattctcaataaaccctttagggaaataggccaggttttcaccgtaacacgccacatcttgcgaatatatgtgtagaaactgccggaaatcgtcgtggtattcactccagagcgatgaaaacgtttcagtttgctcatggaaaacggtgtaacaagggtgaacactatcccatatcaccagctcaccgtctttcatcgccatacggaactctggatgagcattcatcaggcgggcaagaatgtgaataaaggccggataaaacttgtgcttatttttctttacggtctttaaaaaggccgtaatatccagctgaacggtctggttataggtacattgagcaactgactgaaatgcctcaaaatgttctttacgatgccattgggatatatcaacggtggtatatccagtgatttttttctccattttagcttccttagctcctgaaaatctcgataactcaaaaaatacgcccggtagtgatcttatttcattatggtgaaagttggaacctcttacgtgccgatcaacgtctcattttcgccaaaagttggcccagggcttcccggtatcaacagggacaccaggatttatttattctgcgaagtgatcttccgtcacaggtatttattcggcgcaaagtgcgtcgggtgatgctgccaacttactgatttagtgtatgatggtgtttttgaggtgctccagtggcttctgtttctatcagctgtccctcctgttcagctactgacggggtggtgcgtaacggcaaaagcaccgccggacatcagcgctagcggagtgtatactggcttactatgttggcactgatgagggtgtcagtgaagtgcttcatgtggcaggagaaaaaaggctgcaccggtgcgtcagcagaatatgtgatacaggatatattccgcttcctcgctcactgactcgctacgctcggtcgttcgactgcggcgagcggaaatggcttacgaacggggcggagatttcctggaagatgccaggaagatacttaacagggaagtgagagggccgcggcaaagccgtttttccataggctccgcccccctgacaagcatcacgaaatctgacgctcaaatcagtggtggcgaaacccgacaggactataaagataccaggcgtttccccctggcggctccctcgtgcgctctcctgttcctgcctttcggtttaccggtgtcattccgctgttatggccgcgtttgtctcattccacgcctgacactcagttccgggtaggcagttcgctccaagctggactgtatgcacgaaccccccgttcagtccgaccgctgcgccttatccggtaactatcgtcttgagtccaacccggaaagacatgcaaaagcaccactggcagcagccactggtaattgatttagaggagttagtcttgaagtcatgcgccggttaaggctaaactgaaaggacaagttttggtgactgcgctcctccaagccagttacctcggttcaaagagttggtagctcagagaaccttcgaaaaaccgccctgcaaggcggttttttcgttttcagagcaagagattacgcgcagaccaaaacgatctcaagaagatcatcttattaatcagataaaatatttctagatttcagtgcaatttatctcttcaaatgtagcacctgaagtcagccccatacgatataagttgtaattctcatgttagtcatgccccgcgcccaccggaaggagctgactgggttgaaggctctcaagggcatcggtcgagatcccggtgcctaatgagtgagctaacttacattaattgcgttgcgca

SEQ ID NO: 878 - DNA, 4114 bp, Synthetic construct
  source 1..4114: mol_type = other DNA
acacgatataaaaccatctcattgcttgctgggttaactgagttgctgaatttttttctagaatttcgcaaaatttaataggtaaaccttgtttttttaaatttacgatgatataaaaataatgccctaaacaaaggtttaggggtattgtacaggttgtcaagcctcccacaggtcttggtgaaaccaatcactgtgacgacggtaagcaacacttggatgatattcataattgactccacgctactgattacattatacagcatatctaggatttgcggcgaggttcacaatttgtatttaggtactgattgtggatgagaaggttggagaaagaccacttggttaagccggaggatgtgtcctagaattgtcgctattctgtcatcctccggttttgctaatttcattcagggaatataatgaataatgatgattacccatggttcagaaaacgtggttatttgcatttcgatgaacctgtttcattaaaaaaagcggttaaatatgtttcctctccagaaaaaataataaaacattcttttctgccatttttaagctttgaagtaaaatcgtttaaaatcaaaaaagacaaatcaacaaaacaattaagtaaaactgaaaaattaagacctattgcctattcctcacatttggatagtcatatttatgcattttacgcagaatatcttactggacattatgaattattgatccaagaaaacaatttacacgagaacatccttgccttcagatctttaaataaaagcaatatagaatttgccaagagagcatttgatacaattactgaaatgggtgagtgtagcgctgttgcattagatctttctggtttttttgacaatttagatcatcaaattttgaaacaccagtggtgcaaagttattgggactgaagcgttgccgcaagaccattttgccatatacaaaagtataacaagatattctaaagttgataaaaatagagcgtatgagattttaggtatatcaaagaataaccccaagtataatagacgcaagatctgcacccctgttgattttagaaataagattagaaaaaatggtcttattatagttaataattcccaaaaaggtataccccaaggctcgccaattagtgctctactttcaaatatatatatgcttgactttgatattgaaatgagagattacgcgcaggaacgtggtggccattattatcgctattgtgatgatatgctattcattgtaccaactaagtataataaaactctagcaggtgatgtagcccagcggattaagcatcttaaggtagaactcaatactaagaaaactgagattcgagattttatatacaaagacagtaccttagtggcaaatatgcctttacagtatcttgggtttatttttgatgggagtaatatattattacgttcatcttctctcgcaagatattcggaacgaatgaaaagaggtgtccgcttagcaaaagctacaatggacagcaagaataggattagagaaaataaaggtgaagctttaaaagctttatttaagaaaaaattatatgccagatattcacatattggaagaaggaattttttgacttatggttatcgcgccgcgaagatcatgaattcgaaagctataaaaagacagttaaaaccattgcagaaaagattggaaaatgaaatactaaaataaatatttgctggcccgaatcatacagggccacaatacagttgaaaacaagctataataaacaacatctaatttttatataccgcaataactagcataaccccttggggcctctaaacgggtcttgaggggttttttgctgaaacctcaggcatttgagaagcacacggtcacactgcttccggtagtcaataaaccggtaaaccagcaatagacataagcggctatttaacgaccctgccctgaaccgacgaccgggtcgaatttgctttcgaatttctgccattcatccgcttattatcacttattcaggcgtagcaccaggcgtttaagggcaccaataactgccttaaaaaaattacgccccgccctgccactcatcgcaatactgttgtaattcatttaacattctgccgacatggaagccatcacagacggcatgatgaacctgaatcgccagcggcatcagcaccttgtcgccttgcgtataatatttgcccatagtgaaaacgggggcgaagaagttgtccatattggccacgtttaaatcaaaactggtgaaactcacccagggattggctgagacgaaaaacatattctcaataaaccctttagggaaataggccaggttttcaccgtaacacgccacatcttgcgaatatatgtgtagaaactgccggaaatcgtcgtggtattcactccagagcgatgaaaacgtttcagtttgctcatggaaaacggtgtaacaagggtgaacactatcccatatcaccagctcaccgtctttcatcgccatacggaactctggatgagcattcatcaggcgggcaagaatgtgaataaaggccggataaaacttgtgcttatttttctttacggtctttaaaaaggccgtaatatccagctgaacggtctggttataggtacattgagcaactgactgaaatgcctcaaaatgttctttacgatgccattgggatatatcaacggtggtatatccagtgatttttttctccattttagcttccttagctcctgaaaatctcgataactcaaaaaatacgcccggtagtgatcttatttcattatggtgaaagttggaacctcttacgtgccgatcaacgtctcattttcgccaaaagttggcccagggcttcccggtatcaacagggacaccaggatttatttattctgcgaagtgatcttccgtcacaggtatttattcggcgcaaagtgcgtcgggtgatgctgccaacttactgatttagtgtatgatggtgtttttgaggtgctccagtggcttctgtttctatcagctgtccctcctgttcagctactgacggggtggtgcgtaacggcaaaagcaccgccggacatcagcgctagcggagtgtatactggcttactatgttggcactgatgagggtgtcagtgaagtgcttcatgtggcaggagaaaaaaggctgcaccggtgcgtcagcagaatatgtgatacaggatatattccgcttcctcgctcactgactcgctacgctcggtcgttcgactgcggcgagcggaaatggcttacgaacggggcggagatttcctggaagatgccaggaagatacttaacagggaagtgagagggccgcggcaaagccgtttttccataggctccgcccccctgacaagcatcacgaaatctgacgctcaaatcagtggtggcgaaacccgacaggactataaagataccaggcgtttccccctggcggctccctcgtgcgctctcctgttcctgcctttcggtttaccggtgtcattccgctgttatggccgcgtttgtctcattccacgcctgacactcagttccgggtaggcagttcgctccaagctggactgtatgcacgaaccccccgttcagtccgaccgctgcgccttatccggtaactatcgtcttgagtccaacccggaaagacatgcaaaagcaccactggcagcagccactggtaattgatttagaggagttagtcttgaagtcatgcgccggttaaggctaaactgaaaggacaagttttggtgactgcgctcctccaagccagttacctcggttcaaagagttggtagctcagagaaccttcgaaaaaccgccctgcaaggcggttttttcgttttcagagcaagagattacgcgcagaccaaaacgatctcaagaagatcatcttattaatcagataaaatatttctagatttcagtgcaatttatctcttcaaatgtagcacctgaagtcagccccatacgatataagttgtaattctcatgttagtcatgccccgcgcccaccggaaggagctgactgggttgaaggctctcaagggcatcggtcgagatcccggtgcctaatgagtgagctaacttacattaattgcgttgcgca

SEQ ID NO: 879 - DNA, 4198 bp, Synthetic construct
  source 1..4198: mol_type = other DNA
acacgatataaaaccatctcattgcttgctgggttaactgagttgctgaatttttttctagaatttcgcaaaatttaataggtaaaccttgtttttttaaatttacgatgatataaaaataatgccctaaacaaaggtttaggggtattgtacaggttgtcaagcctcccacaggtcttggtgaaaccaatcactgtgacgacggtaagcaacacttggatgatattcataattgactccacgctacctaatttttagcgaaacatatctaacatttgcggcgaggttcacaatttgtatttaggtactgattgtggatgagaaggttggagaaagaccacttggttaagccggaggatgtgtcctagaattgtcgctattctgtcatcctccggttttgctaatttcattcagggaatataatggactacaaagaccatgacggtgattataaagatcatgacatcgattacaaggatgacgatgacaagggaggaagcggatcgatgaataatgatgattacccatggttcagaaaacgtggttatttgcatttcgatgaacctgtttcattaaaaaaagcggttaaatatgtttcctctccagaaaaaataataaaacattcttttctgccatttttaagctttgaagtaaaatcgtttaaaatcaaaaaagacaaatcaacaaaacaattaagtaaaactgaaaaattaagacctattgcctattcctcacatttggatagtcatatttatgcattttacgcagaatatcttactggacattatgaattattgatccaagaaaacaatttacacgagaacatccttgccttcagatctttaaataaaagcaatatagaatttgccaagagagcatttgatacaattactgaaatgggtgagtgtagcgctgttgcattagatctttctggtttttttgacaatttagatcatcaaattttgaaacaccagtggtgcaaagttattgggactgaagcgttgccgcaagaccattttgccatatacaaaagtataacaagatattctaaagttgataaaaatagagcgtatgagattttaggtatatcaaagaataaccccaagtataatagacgcaagatctgcacccctgttgattttagaaataagattagaaaaaatggtcttattatagttaataattcccaaaaaggtataccccaaggctcgccaattagtgctctactttcaaatatatatatgcttgactttgatattgaaatgagagattacgcgcaggaacgtggtggccattattatcgctattgtgatgatatgctattcattgtaccaactaagtataataaaactctagcaggtgatgtagcccagcggattaagcatcttaaggtagaactcaatactaagaaaactgagattcgagattttatatacaaagacagtaccttagtggcaaatatgcctttacagtatcttgggtttatttttgatgggagtaatatattattacgttcatcttctctcgcaagatattcggaacgaatgaaaagaggtgtccgcttagcaaaagctacaatggacagcaagaataggattagagaaaataaaggtgaagctttaaaagctttatttaagaaaaaattatatgccagatattcacatattggaagaaggaattttttgacttatggttatcgcgccgcgaagatcatgaattcgaaagctataaaaagacagttaaaaccattgcagaaaagattggaaaatgaaatactaaaataaatatttgctggcccgaatcatacagggccacaatacagttgaaaacaagctataataaacaacatctaatttttatataccgcaataactagcataaccccttggggcctctaaacgggtcttgaggggttttttgctgaaacctcaggcatttgagaagcacacggtcacactgcttccggtagtcaataaaccggtaaaccagcaatagacataagcggctatttaacgaccctgccctgaaccgacgaccgggtcgaatttgctttcgaatttctgccattcatccgcttattatcacttattcaggcgtagcaccaggcgtttaagggcaccaataactgccttaaaaaaattacgccccgccctgccactcatcgcaatactgttgtaattcatttaacattctgccgacatggaagccatcacagacggcatgatgaacctgaatcgccagcggcatcagcaccttgtcgccttgcgtataatatttgcccatagtgaaaacgggggcgaagaagttgtccatattggccacgtttaaatcaaaactggtgaaactcacccagggattggctgagacgaaaaacatattctcaataaaccctttagggaaataggccaggttttcaccgtaacacgccacatcttgcgaatatatgtgtagaaactgccggaaatcgtcgtggtattcactccagagcgatgaaaacgtttcagtttgctcatggaaaacggtgtaacaagggtgaacactatcccatatcaccagctcaccgtctttcatcgccatacggaactctggatgagcattcatcaggcgggcaagaatgtgaataaaggccggataaaacttgtgcttatttttctttacggtctttaaaaaggccgtaatatccagctgaacggtctggttataggtacattgagcaactgactgaaatgcctcaaaatgttctttacgatgccattgggatatatcaacggtggtatatccagtgatttttttctccattttagcttccttagctcctgaaaatctcgataactcaaaaaatacgcccggtagtgatcttatttcattatggtgaaagttggaacctcttacgtgccgatcaacgtctcattttcgccaaaagttggcccagggcttcccggtatcaacagggacaccaggatttatttattctgcgaagtgatcttccgtcacaggtatttattcggcgcaaagtgcgtcgggtgatgctgccaacttactgatttagtgtatgatggtgtttttgaggtgctccagtggcttctgtttctatcagctgtccctcctgttcagctactgacggggtggtgcgtaacggcaaaagcaccgccggacatcagcgctagcggagtgtatactggcttactatgttggcactgatgagggtgtcagtgaagtgcttcatgtggcaggagaaaaaaggctgcaccggtgcgtcagcagaatatgtgatacaggatatattccgcttcctcgctcactgactcgctacgctcggtcgttcgactgcggcgagcggaaatggcttacgaacggggcggagatttcctggaagatgccaggaagatacttaacagggaagtgagagggccgcggcaaagccgtttttccataggctccgcccccctgacaagcatcacgaaatctgacgctcaaatcagtggtggcgaaacccgacaggactataaagataccaggcgtttccccctggcggctccctcgtgcgctctcctgttcctgcctttcggtttaccggtgtcattccgctgttatggccgcgtttgtctcattccacgcctgacactcagttccgggtaggcagttcgctccaagctggactgtatgcacgaaccccccgttcagtccgaccgctgcgccttatccggtaactatcgtcttgagtccaacccggaaagacatgcaaaagcaccactggcagcagccactggtaattgatttagaggagttagtcttgaagtcatgcgccggttaaggctaaactgaaaggacaagttttggtgactgcgctcctccaagccagttacctcggttcaaagagttggtagctcagagaaccttcgaaaaaccgccctgcaaggcggttttttcgttttcagagcaagagattacgcgcagaccaaaacgatctcaagaagatcatcttattaatcagataaaatatttctagatttcagtgcaatttatctcttcaaatgtagcacctgaagtcagccccatacgatataagttgtaattctcatgttagtcatgccccgcgcccaccggaaggagctgactgggttgaaggctctcaagggcatcggtcgagatcccggtgcctaatgagtgagctaacttacattaattgcgttgcgca

SEQ ID NO: 880 - DNA, 4198 bp, Synthetic construct
  source 1..4198: mol_type = other DNA
acacgatataaaaccatctcattgcttgctgggttaactgagttgctgaatttttttctagaatttcgcaaaatttaataggtaaaccttgtttttttaaatttacgatgatataaaaataatgccctaaacaaaggtttaggggtattgtacaggttgtcaagcctcccacaggtcttggtgaaaccaatcactgtgacgacggtaagcaacacttggatgatattcataattgactccacgctactgattacattatacagcatatctaacatttgcggcgagtgtgtgttatagtgttgggatacctaaatcttatgagaaggttggagaaagaccacttggttaagccggaggatgtgtcctagaattgtcgctattctgtcatcctccggttttgctaatttcattcagggaatataatggactacaaagaccatgacggtgattataaagatcatgacatcgattacaaggatgacgatgacaagggaggaagcggatcgatgaataatgatgattacccatggttcagaaaacgtggttatttgcatttcgatgaacctgtttcattaaaaaaagcggttaaatatgtttcctctccagaaaaaataataaaacattcttttctgccatttttaagctttgaagtaaaatcgtttaaaatcaaaaaagacaaatcaacaaaacaattaagtaaaactgaaaaattaagacctattgcctattcctcacatttggatagtcatatttatgcattttacgcagaatatcttactggacattatgaattattgatccaagaaaacaatttacacgagaacatccttgccttcagatctttaaataaaagcaatatagaatttgccaagagagcatttgatacaattactgaaatgggtgagtgtagcgctgttgcattagatctttctggtttttttgacaatttagatcatcaaattttgaaacaccagtggtgcaaagttattgggactgaagcgttgccgcaagaccattttgccatatacaaaagtataacaagatattctaaagttgataaaaatagagcgtatgagattttaggtatatcaaagaataaccccaagtataatagacgcaagatctgcacccctgttgattttagaaataagattagaaaaaatggtcttattatagttaataattcccaaaaaggtataccccaaggctcgccaattagtgctctactttcaaatatatatatgcttgactttgatattgaaatgagagattacgcgcaggaacgtggtggccattattatcgctattgtgatgatatgctattcattgtaccaactaagtataataaaactctagcaggtgatgtagcccagcggattaagcatcttaaggtagaactcaatactaagaaaactgagattcgagattttatatacaaagacagtaccttagtggcaaatatgcctttacagtatcttgggtttatttttgatgggagtaatatattattacgttcatcttctctcgcaagatattcggaacgaatgaaaagaggtgtccgcttagcaaaagctacaatggacagcaagaataggattagagaaaataaaggtgaagctttaaaagctttatttaagaaaaaattatatgccagatattcacatattggaagaaggaattttttgacttatggttatcgcgccgcgaagatcatgaattcgaaagctataaaaagacagttaaaaccattgcagaaaagattggaaaatgaaatactaaaataaatatttgctggcccgaatcatacagggccacaatacagttgaaaacaagctataataaacaacatctaatttttatataccgcaataactagcataaccccttggggcctctaaacgggtcttgaggggttttttgctgaaacctcaggcatttgagaagcacacggtcacactgcttccggtagtcaataaaccggtaaaccagcaatagacataagcggctatttaacgaccctgccctgaaccgacgaccgggtcgaatttgctttcgaatttctgccattcatccgcttattatcacttattcaggcgtagcaccaggcgtttaagggcaccaataactgccttaaaaaaattacgccccgccctgccactcatcgcaatactgttgtaattcatttaacattctgccgacatggaagccatcacagacggcatgatgaacctgaatcgccagcggcatcagcaccttgtcgccttgcgtataatatttgcccatagtgaaaacgggggcgaagaagttgtccatattggccacgtttaaatcaaaactggtgaaactcacccagggattggctgagacgaaaaacatattctcaataaaccctttagggaaataggccaggttttcaccgtaacacgccacatcttgcgaatatatgtgtagaaactgccggaaatcgtcgtggtattcactccagagcgatgaaaacgtttcagtttgctcatggaaaacggtgtaacaagggtgaacactatcccatatcaccagctcaccgtctttcatcgccatacggaactctggatgagcattcatcaggcgggcaagaatgtgaataaaggccggataaaacttgtgcttatttttctttacggtctttaaaaaggccgtaatatccagctgaacggtctggttataggtacattgagcaactgactgaaatgcctcaaaatgttctttacgatgccattgggatatatcaacggtggtatatccagtgatttttttctccattttagcttccttagctcctgaaaatctcgataactcaaaaaatacgcccggtagtgatcttatttcattatggtgaaagttggaacctcttacgtgccgatcaacgtctcattttcgccaaaagttggcccagggcttcccggtatcaacagggacaccaggatttatttattctgcgaagtgatcttccgtcacaggtatttattcggcgcaaagtgcgtcgggtgatgctgccaacttactgatttagtgtatgatggtgtttttgaggtgctccagtggcttctgtttctatcagctgtccctcctgttcagctactgacggggtggtgcgtaacggcaaaagcaccgccggacatcagcgctagcggagtgtatactggcttactatgttggcactgatgagggtgtcagtgaagtgcttcatgtggcaggagaaaaaaggctgcaccggtgcgtcagcagaatatgtgatacaggatatattccgcttcctcgctcactgactcgctacgctcggtcgttcgactgcggcgagcggaaatggcttacgaacggggcggagatttcctggaagatgccaggaagatacttaacagggaagtgagagggccgcggcaaagccgtttttccataggctccgcccccctgacaagcatcacgaaatctgacgctcaaatcagtggtggcgaaacccgacaggactataaagataccaggcgtttccccctggcggctccctcgtgcgctctcctgttcctgcctttcggtttaccggtgtcattccgctgttatggccgcgtttgtctcattccacgcctgacactcagttccgggtaggcagttcgctccaagctggactgtatgcacgaaccccccgttcagtccgaccgctgcgccttatccggtaactatcgtcttgagtccaacccggaaagacatgcaaaagcaccactggcagcagccactggtaattgatttagaggagttagtcttgaagtcatgcgccggttaaggctaaactgaaaggacaagttttggtgactgcgctcctccaagccagttacctcggttcaaagagttggtagctcagagaaccttcgaaaaaccgccctgcaaggcggttttttcgttttcagagcaagagattacgcgcagaccaaaacgatctcaagaagatcatcttattaatcagataaaatatttctagatttcagtgcaatttatctcttcaaatgtagcacctgaagtcagccccatacgatataagttgtaattctcatgttagtcatgccccgcgcccaccggaaggagctgactgggttgaaggctctcaagggcatcggtcgagatcccggtgcctaatgagtgagctaacttacattaattgcgttgcgca

SEQ ID NO: 881 - DNA, 4198 bp, Synthetic construct
  source 1..4198: mol_type = other DNA
acacgatataaaaccatctcattgcttgctgggttaactgagttgctgaatttttttctagaatttcgcaaaatttaataggtaaaccttgtttttttaaatttacgatgatataaaaataatgccctaaacaaaggtttaggggtattgtacaggttgtcaagcctcccacaggtcttggtgaaaccaatcactgtgacgacggtaagcaacacttggatgatattcataattgactccacgctactgattacattatacagaacttatcacatttgcggcgaggttcacaatttgtatttaggtactgattgtggatgagaaggttggagaaagaccacttggttaagccggaggatgtgtcctagaattgtcgctattctgtcatcctccggttttgctaatttcattcagggaatataatggactacaaagaccatgacggtgattataaagatcatgacatcgattacaaggatgacgatgacaagggaggaagcggatcgatgaataatgatgattacccatggttcagaaaacgtggttatttgcatttcgatgaacctgtttcattaaaaaaagcggttaaatatgtttcctctccagaaaaaataataaaacattcttttctgccatttttaagctttgaagtaaaatcgtttaaaatcaaaaaagacaaatcaacaaaacaattaagtaaaactgaaaaattaagacctattgcctattcctcacatttggatagtcatatttatgcattttacgcagaatatcttactggacattatgaattattgatccaagaaaacaatttacacgagaacatccttgccttcagatctttaaataaaagcaatatagaatttgccaagagagcatttgatacaattactgaaatgggtgagtgtagcgctgttgcattagatctttctggtttttttgacaatttagatcatcaaattttgaaacaccagtggtgcaaagttattgggactgaagcgttgccgcaagaccattttgccatatacaaaagtataacaagatattctaaagttgataaaaatagagcgtatgagattttaggtatatcaaagaataaccccaagtataatagacgcaagatctgcacccctgttgattttagaaataagattagaaaaaatggtcttattatagttaataattcccaaaaaggtataccccaaggctcgccaattagtgctctactttcaaatatatatatgcttgactttgatattgaaatgagagattacgcgcaggaacgtggtggccattattatcgctattgtgatgatatgctattcattgtaccaactaagtataataaaactctagcaggtgatgtagcccagcggattaagcatcttaaggtagaactcaatactaagaaaactgagattcgagattttatatacaaagacagtaccttagtggcaaatatgcctttacagtatcttgggtttatttttgatgggagtaatatattattacgttcatcttctctcgcaagatattcggaacgaatgaaaagaggtgtccgcttagcaaaagctacaatggacagcaagaataggattagagaaaataaaggtgaagctttaaaagctttatttaagaaaaaattatatgccagatattcacatattggaagaaggaattttttgacttatggttatcgcgccgcgaagatcatgaattcgaaagctataaaaagacagttaaaaccattgcagaaaagattggaaaatgaaatactaaaataaatatttgctggcccgaatcatacagggccacaatacagttgaaaacaagctataataaacaacatctaatttttatataccgcaataactagcataaccccttggggcctctaaacgggtcttgaggggttttttgctgaaacctcaggcatttgagaagcacacggtcacactgcttccggtagtcaataaaccggtaaaccagcaatagacataagcggctatttaacgaccctgccctgaaccgacgaccgggtcgaatttgctttcgaatttctgccattcatccgcttattatcacttattcaggcgtagcaccaggcgtttaagggcaccaataactgccttaaaaaaattacgccccgccctgccactcatcgcaatactgttgtaattcatttaacattctgccgacatggaagccatcacagacggcatgatgaacctgaatcgccagcggcatcagcaccttgtcgccttgcgtataatatttgcccatagtgaaaacgggggcgaagaagttgtccatattggccacgtttaaatcaaaactggtgaaactcacccagggattggctgagacgaaaaacatattctcaataaaccctttagggaaataggccaggttttcaccgtaacacgccacatcttgcgaatatatgtgtagaaactgccggaaatcgtcgtggtattcactccagagcgatgaaaacgtttcagtttgctcatggaaaacggtgtaacaagggtgaacactatcccatatcaccagctcaccgtctttcatcgccatacggaactctggatgagcattcatcaggcgggcaagaatgtgaataaaggccggataaaacttgtgcttatttttctttacggtctttaaaaaggccgtaatatccagctgaacggtctggttataggtacattgagcaactgactgaaatgcctcaaaatgttctttacgatgccattgggatatatcaacggtggtatatccagtgatttttttctccattttagcttccttagctcctgaaaatctcgataactcaaaaaatacgcccggtagtgatcttatttcattatggtgaaagttggaacctcttacgtgccgatcaacgtctcattttcgccaaaagttggcccagggcttcccggtatcaacagggacaccaggatttatttattctgcgaagtgatcttccgtcacaggtatttattcggcgcaaagtgcgtcgggtgatgctgccaacttactgatttagtgtatgatggtgtttttgaggtgctccagtggcttctgtttctatcagctgtccctcctgttcagctactgacggggtggtgcgtaacggcaaaagcaccgccggacatcagcgctagcggagtgtatactggcttactatgttggcactgatgagggtgtcagtgaagtgcttcatgtggcaggagaaaaaaggctgcaccggtgcgtcagcagaatatgtgatacaggatatattccgcttcctcgctcactgactcgctacgctcggtcgttcgactgcggcgagcggaaatggcttacgaacggggcggagatttcctggaagatgccaggaagatacttaacagggaagtgagagggccgcggcaaagccgtttttccataggctccgcccccctgacaagcatcacgaaatctgacgctcaaatcagtggtggcgaaacccgacaggactataaagataccaggcgtttccccctggcggctccctcgtgcgctctcctgttcctgcctttcggtttaccggtgtcattccgctgttatggccgcgtttgtctcattccacgcctgacactcagttccgggtaggcagttcgctccaagctggactgtatgcacgaaccccccgttcagtccgaccgctgcgccttatccggtaactatcgtcttgagtccaacccggaaagacatgcaaaagcaccactggcagcagccactggtaattgatttagaggagttagtcttgaagtcatgcgccggttaaggctaaactgaaaggacaagttttggtgactgcgctcctccaagccagttacctcggttcaaagagttggtagctcagagaaccttcgaaaaaccgccctgcaaggcggttttttcgttttcagagcaagagattacgcgcagaccaaaacgatctcaagaagatcatcttattaatcagataaaatatttctagatttcagtgcaatttatctcttcaaatgtagcacctgaagtcagccccatacgatataagttgtaattctcatgttagtcatgccccgcgcccaccggaaggagctgactgggttgaaggctctcaagggcatcggtcgagatcccggtgcctaatgagtgagctaacttacattaattgcgttgcgca

SEQ ID NO: 882 - DNA, 4114 bp, Synthetic construct
  source 1..4114: mol_type = other DNA
acacgatataaaaccatctcattgcttgctgggttaactgagttgctgaatttttttctagaatttcgcaaaatttaataggtaaaccttgtttttttaaatttacgatgatataaaaataatgccctaaacaaaggtttaggggtattgtacaggttgtcaagcctcccgcaggtcttggtgaaaccaatcactgtgacgacggtaagcaacacttggatgatattcataattgactccacgctactgattacattatacagcatatctaacatttgcggcgaggttcacaatttgtatttaggtactgattgtggatgagaaggttggagaaagaccacttggttaagccggaggatgtgtcctagaattgtcgctattctgtcatcctccggttttgctaatttcattcagggaatataatgaataatgatgattacccatggttcagaaaacgtggttatttgcatttcgatgaacctgtttcattaaaaaaagcggttaaatatgtttcctctccagaaaaaataataaaacattcttttctgccatttttaagctttgaagtaaaatcgtttaaaatcaaaaaagacaaatcaacaaaacaattaagtaaaactgaaaaattaagacctattgcctattcctcacatttggatagtcatatttatgcattttacgcagaatatcttactggacattatgaattattgatccaagaaaacaatttacacgagaacatccttgccttcagatctttaaataaaagcaatatagaatttgccaagagagcatttgatacaattactgaaatgggtgagtgtagcgctgttgcattagatctttctggtttttttgacaatttagatcatcaaattttgaaacaccagtggtgcaaagttattgggactgaagcgttgccgcaagaccattttgccatatacaaaagtataacaagatattctaaagttgataaaaatagagcgtatgagattttaggtatatcaaagaataaccccaagtataatagacgcaagatctgcacccctgttgattttagaaataagattagaaaaaatggtcttattatagttaataattcccaaaaaggtataccccaaggctcgccaattagtgctctactttcaaatatatatatgcttgactttgatattgaaatgagagattacgcgcaggaacgtggtggccattattatcgctattgtgatgatatgctattcattgtaccaactaagtataataaaactctagcaggtgatgtagcccagcggattaagcatcttaaggtagaactcaatactaagaaaactgagattcgagattttatatacaaagacagtaccttagtggcaaatatgcctttacagtatcttgggtttatttttgatgggagtaatatattattacgttcatcttctctcgcaagatattcggaacgaatgaaaagaggtgtccgcttagcaaaagctacaatggacagcaagaataggattagagaaaataaaggtgaagctttaaaagctttatttaagaaaaaattatatgccagatattcacatattggaagaaggaattttttgacttatggttatcgcgccgcgaagatcatgaattcgaaagctataaaaagacagttaaaaccattgcagaaaagattggaaaatgaaatactaaaataaatatttgctggcccgaatcatacagggccacaatacagttgaaaacaagctataataaacaacatctaatttttatataccgcaataactagcataaccccttggggcctctaaacgggtcttgaggggttttttgctgaaacctcaggcatttgagaagcacacggtcacactgcttccggtagtcaataaaccggtaaaccagcaatagacataagcggctatttaacgaccctgccctgaaccgacgaccgggtcgaatttgctttcgaatttctgccattcatccgcttattatcacttattcaggcgtagcaccaggcgtttaagggcaccaataactgccttaaaaaaattacgccccgccctgccactcatcgcaatactgttgtaattcatttaacattctgccgacatggaagccatcacagacggcatgatgaacctgaatcgccagcggcatcagcaccttgtcgccttgcgtataatatttgcccatagtgaaaacgggggcgaagaagttgtccatattggccacgtttaaatcaaaactggtgaaactcacccagggattggctgagacgaaaaacatattctcaataaaccctttagggaaataggccaggttttcaccgtaacacgccacatcttgcgaatatatgtgtagaaactgccggaaatcgtcgtggtattcactccagagcgatgaaaacgtttcagtttgctcatggaaaacggtgtaacaagggtgaacactatcccatatcaccagctcaccgtctttcatcgccatacggaactctggatgagcattcatcaggcgggcaagaatgtgaataaaggccggataaaacttgtgcttatttttctttacggtctttaaaaaggccgtaatatccagctgaacggtctggttataggtacattgagcaactgactgaaatgcctcaaaatgttctttacgatgccattgggatatatcaacggtggtatatccagtgatttttttctccattttagcttccttagctcctgaaaatctcgataactcaaaaaatacgcccggtagtgatcttatttcattatggtgaaagttggaacctcttacgtgccgatcaacgtctcattttcgccaaaagttggcccagggcttcccggtatcaacagggacaccaggatttatttattctgcgaagtgatcttccgtcacaggtatttattcggcgcaaagtgcgtcgggtgatgctgccaacttactgatttagtgtatgatggtgtttttgaggtgctccagtggcttctgtttctatcagctgtccctcctgttcagctactgacggggtggtgcgtaacggcaaaagcaccgccggacatcagcgctagcggagtgtatactggcttactatgttggcactgatgagggtgtcagtgaagtgcttcatgtggcaggagaaaaaaggctgcaccggtgcgtcagcagaatatgtgatacaggatatattccgcttcctcgctcactgactcgctacgctcggtcgttcgactgcggcgagcggaaatggcttacgaacggggcggagatttcctggaagatgccaggaagatacttaacagggaagtgagagggccgcggcaaagccgtttttccataggctccgcccccctgacaagcatcacgaaatctgacgctcaaatcagtggtggcgaaacccgacaggactataaagataccaggcgtttccccctggcggctccctcgtgcgctctcctgttcctgcctttcggtttaccggtgtcattccgctgttatggccgcgtttgtctcattccacgcctgacactcagttccgggtaggcagttcgctccaagctggactgtatgcacgaaccccccgttcagtccgaccgctgcgccttatccggtaactatcgtcttgagtccaacccggaaagacatgcaaaagcaccactggcagcagccactggtaattgatttagaggagttagtcttgaagtcatgcgccggttaaggctaaactgaaaggacaagttttggtgactgcgctcctccaagccagttacctcggttcaaagagttggtagctcagagaaccttcgaaaaaccgccctgcaaggcggttttttcgttttcagagcaagagattacgcgcagaccaaaacgatctcaagaagatcatcttattaatcagataaaatatttctagatttcagtgcaatttatctcttcaaatgtagcacctgaagtcagccccatacgatataagttgtaattctcatgttagtcatgccccgcgcccaccggaaggagctgactgggttgaaggctctcaagggcatcggtcgagatcccggtgcctaatgagtgagctaacttacattaattgcgttgcgca

SEQ ID NO: 883 - DNA, 4114 bp, Synthetic construct
  source 1..4114: mol_type = other DNA
acacgatataaaaccatctcattgcttgctgggttaactgagttgctgaatttttttctagaatttcgcaaaatttaataggtaaaccttgtttttttaaatttacgatgatataaaaataatgccctaaacaaaggtttaggggtattgtacaggttgtcaagcctcccccaggtcttggtgaaaccaatcactgtgacgacggtaagcaacacttggatgatattcataattgactccacgctactgattacattatacagcatatctaacatttgcggcgaggttcacaatttgtatttaggtactgattgtggatgagaaggttggagaaagaccacttggttaagccggaggatgtgtcctagaattgtcgctattctgtcatcctccggttttgctaatttcattcagggaatataatgaataatgatgattacccatggttcagaaaacgtggttatttgcatttcgatgaacctgtttcattaaaaaaagcggttaaatatgtttcctctccagaaaaaataataaaacattcttttctgccatttttaagctttgaagtaaaatcgtttaaaatcaaaaaagacaaatcaacaaaacaattaagtaaaactgaaaaattaagacctattgcctattcctcacatttggatagtcatatttatgcattttacgcagaatatcttactggacattatgaattattgatccaagaaaacaatttacacgagaacatccttgccttcagatctttaaataaaagcaatatagaatttgccaagagagcatttgatacaattactgaaatgggtgagtgtagcgctgttgcattagatctttctggtttttttgacaatttagatcatcaaattttgaaacaccagtggtgcaaagttattgggactgaagcgttgccgcaagaccattttgccatatacaaaagtataacaagatattctaaagttgataaaaatagagcgtatgagattttaggtatatcaaagaataaccccaagtataatagacgcaagatctgcacccctgttgattttagaaataagattagaaaaaatggtcttattatagttaataattcccaaaaaggtataccccaaggctcgccaattagtgctctactttcaaatatatatatgcttgactttgatattgaaatgagagattacgcgcaggaacgtggtggccattattatcgctattgtgatgatatgctattcattgtaccaactaagtataataaaactctagcaggtgatgtagcccagcggattaagcatcttaaggtagaactcaatactaagaaaactgagattcgagattttatatacaaagacagtaccttagtggcaaatatgcctttacagtatcttgggtttatttttgatgggagtaatatattattacgttcatcttctctcgcaagatattcggaacgaatgaaaagaggtgtccgcttagcaaaagctacaatggacagcaagaataggattagagaaaataaaggtgaagctttaaaagctttatttaagaaaaaattatatgccagatattcacatattggaagaaggaattttttgacttatggttatcgcgccgcgaagatcatgaattcgaaagctataaaaagacagttaaaaccattgcagaaaagattggaaaatgaaatactaaaataaatatttgctggcccgaatcatacagggccacaatacagttgaaaacaagctataataaacaacatctaatttttatataccgcaataactagcataaccccttggggcctctaaacgggtcttgaggggttttttgctgaaacctcaggcatttgagaagcacacggtcacactgcttccggtagtcaataaaccggtaaaccagcaatagacataagcggctatttaacgaccctgccctgaaccgacgaccgggtcgaatttgctttcgaatttctgccattcatccgcttattatcacttattcaggcgtagcaccaggcgtttaagggcaccaataactgccttaaaaaaattacgccccgccctgccactcatcgcaatactgttgtaattcatttaacattctgccgacatggaagccatcacagacggcatgatgaacctgaatcgccagcggcatcagcaccttgtcgccttgcgtataatatttgcccatagtgaaaacgggggcgaagaagttgtccatattggccacgtttaaatcaaaactggtgaaactcacccagggattggctgagacgaaaaacatattctcaataaaccctttagggaaataggccaggttttcaccgtaacacgccacatcttgcgaatatatgtgtagaaactgccggaaatcgtcgtggtattcactccagagcgatgaaaacgtttcagtttgctcatggaaaacggtgtaacaagggtgaacactatcccatatcaccagctcaccgtctttcatcgccatacggaactctggatgagcattcatcaggcgggcaagaatgtgaataaaggccggataaaacttgtgcttatttttctttacggtctttaaaaaggccgtaatatccagctgaacggtctggttataggtacattgagcaactgactgaaatgcctcaaaatgttctttacgatgccattgggatatatcaacggtggtatatccagtgatttttttctccattttagcttccttagctcctgaaaatctcgataactcaaaaaatacgcccggtagtgatcttatttcattatggtgaaagttggaacctcttacgtgccgatcaacgtctcattttcgccaaaagttggcccagggcttcccggtatcaacagggacaccaggatttatttattctgcgaagtgatcttccgtcacaggtatttattcggcgcaaagtgcgtcgggtgatgctgccaacttactgatttagtgtatgatggtgtttttgaggtgctccagtggcttctgtttctatcagctgtccctcctgttcagctactgacggggtggtgcgtaacggcaaaagcaccgccggacatcagcgctagcggagtgtatactggcttactatgttggcactgatgagggtgtcagtgaagtgcttcatgtggcaggagaaaaaaggctgcaccggtgcgtcagcagaatatgtgatacaggatatattccgcttcctcgctcactgactcgctacgctcggtcgttcgactgcggcgagcggaaatggcttacgaacggggcggagatttcctggaagatgccaggaagatacttaacagggaagtgagagggccgcggcaaagccgtttttccataggctccgcccccctgacaagcatcacgaaatctgacgctcaaatcagtggtggcgaaacccgacaggactataaagataccaggcgtttccccctggcggctccctcgtgcgctctcctgttcctgcctttcggtttaccggtgtcattccgctgttatggccgcgtttgtctcattccacgcctgacactcagttccgggtaggcagttcgctccaagctggactgtatgcacgaaccccccgttcagtccgaccgctgcgccttatccggtaactatcgtcttgagtccaacccggaaagacatgcaaaagcaccactggcagcagccactggtaattgatttagaggagttagtcttgaagtcatgcgccggttaaggctaaactgaaaggacaagttttggtgactgcgctcctccaagccagttacctcggttcaaagagttggtagctcagagaaccttcgaaaaaccgccctgcaaggcggttttttcgttttcagagcaagagattacgcgcagaccaaaacgatctcaagaagatcatcttattaatcagataaaatatttctagatttcagtgcaatttatctcttcaaatgtagcacctgaagtcagccccatacgatataagttgtaattctcatgttagtcatgccccgcgcccaccggaaggagctgactgggttgaaggctctcaagggcatcggtcgagatcccggtgcctaatgagtgagctaacttacattaattgcgttgcgca

SEQ ID NO: 884 - DNA, 4114 bp, Synthetic construct
  source 1..4114: mol_type = other DNA
acacgatataaaaccatctcattgcttgctgggttaactgagttgctgaatttttttctagaatttcgcaaaatttaataggtaaaccttgtttttttaaatttacgatgatataaaaataatgccctaaacaaaggtttaggggtattgtacaggttgtcaagcctccctcaggtcttggtgaaaccaatcactgtgacgacggtaagcaacacttggatgatattcataattgactccacgctactgattacattatacagcatatctaacatttgcggcgaggttcacaatttgtatttaggtactgattgtggatgagaaggttggagaaagaccacttggttaagccggaggatgtgtcctagaattgtcgctattctgtcatcctccggttttgctaatttcattcagggaatataatgaataatgatgattacccatggttcagaaaacgtggttatttgcatttcgatgaacctgtttcattaaaaaaagcggttaaatatgtttcctctccagaaaaaataataaaacattcttttctgccatttttaagctttgaagtaaaatcgtttaaaatcaaaaaagacaaatcaacaaaacaattaagtaaaactgaaaaattaagacctattgcctattcctcacatttggatagtcatatttatgcattttacgcagaatatcttactggacattatgaattattgatccaagaaaacaatttacacgagaacatccttgccttcagatctttaaataaaagcaatatagaatttgccaagagagcatttgatacaattactgaaatgggtgagtgtagcgctgttgcattagatctttctggtttttttgacaatttagatcatcaaattttgaaacaccagtggtgcaaagttattgggactgaagcgttgccgcaagaccattttgccatatacaaaagtataacaagatattctaaagttgataaaaatagagcgtatgagattttaggtatatcaaagaataaccccaagtataatagacgcaagatctgcacccctgttgattttagaaataagattagaaaaaatggtcttattatagttaataattcccaaaaaggtataccccaaggctcgccaattagtgctctactttcaaatatatatatgcttgactttgatattgaaatgagagattacgcgcaggaacgtggtggccattattatcgctattgtgatgatatgctattcattgtaccaactaagtataataaaactctagcaggtgatgtagcccagcggattaagcatcttaaggtagaactcaatactaagaaaactgagattcgagattttatatacaaagacagtaccttagtggcaaatatgcctttacagtatcttgggtttatttttgatgggagtaatatattattacgttcatcttctctcgcaagatattcggaacgaatgaaaagaggtgtccgcttagcaaaagctacaatggacagcaagaataggattagagaaaataaaggtgaagctttaaaagctttatttaagaaaaaattatatgccagatattcacatattggaagaaggaattttttgacttatggttatcgcgccgcgaagatcatgaattcgaaagctataaaaagacagttaaaaccattgcagaaaagattggaaaatgaaatactaaaataaatatttgctggcccgaatcatacagggccacaatacagttgaaaacaagctataataaacaacatctaatttttatataccgcaataactagcataaccccttggggcctctaaacgggtcttgaggggttttttgctgaaacctcaggcatttgagaagcacacggtcacactgcttccggtagtcaataaaccggtaaaccagcaatagacataagcggctatttaacgaccctgccctgaaccgacgaccgggtcgaatttgctttcgaatttctgccattcatccgcttattatcacttattcaggcgtagcaccaggcgtttaagggcaccaataactgccttaaaaaaattacgccccgccctgccactcatcgcaatactgttgtaattcatttaacattctgccgacatggaagccatcacagacggcatgatgaacctgaatcgccagcggcatcagcaccttgtcgccttgcgtataatatttgcccatagtgaaaacgggggcgaagaagttgtccatattggccacgtttaaatcaaaactggtgaaactcacccagggattggctgagacgaaaaacatattctcaataaaccctttagggaaataggccaggttttcaccgtaacacgccacatcttgcgaatatatgtgtagaaactgccggaaatcgtcgtggtattcactccagagcgatgaaaacgtttcagtttgctcatggaaaacggtgtaacaagggtgaacactatcccatatcaccagctcaccgtctttcatcgccatacggaactctggatgagcattcatcaggcgggcaagaatgtgaataaaggccggataaaacttgtgcttatttttctttacggtctttaaaaaggccgtaatatccagctgaacggtctggttataggtacattgagcaactgactgaaatgcctcaaaatgttctttacgatgccattgggatatatcaacggtggtatatccagtgatttttttctccattttagcttccttagctcctgaaaatctcgataactcaaaaaatacgcccggtagtgatcttatttcattatggtgaaagttggaacctcttacgtgccgatcaacgtctcattttcgccaaaagttggcccagggcttcccggtatcaacagggacaccaggatttatttattctgcgaagtgatcttccgtcacaggtatttattcggcgcaaagtgcgtcgggtgatgctgccaacttactgatttagtgtatgatggtgtttttgaggtgctccagtggcttctgtttctatcagctgtccctcctgttcagctactgacggggtggtgcgtaacggcaaaagcaccgccggacatcagcgctagcggagtgtatactggcttactatgttggcactgatgagggtgtcagtgaagtgcttcatgtggcaggagaaaaaaggctgcaccggtgcgtcagcagaatatgtgatacaggatatattccgcttcctcgctcactgactcgctacgctcggtcgttcgactgcggcgagcggaaatggcttacgaacggggcggagatttcctggaagatgccaggaagatacttaacagggaagtgagagggccgcggcaaagccgtttttccataggctccgcccccctgacaagcatcacgaaatctgacgctcaaatcagtggtggcgaaacccgacaggactataaagataccaggcgtttccccctggcggctccctcgtgcgctctcctgttcctgcctttcggtttaccggtgtcattccgctgttatggccgcgtttgtctcattccacgcctgacactcagttccgggtaggcagttcgctccaagctggactgtatgcacgaaccccccgttcagtccgaccgctgcgccttatccggtaactatcgtcttgagtccaacccggaaagacatgcaaaagcaccactggcagcagccactggtaattgatttagaggagttagtcttgaagtcatgcgccggttaaggctaaactgaaaggacaagttttggtgactgcgctcctccaagccagttacctcggttcaaagagttggtagctcagagaaccttcgaaaaaccgccctgcaaggcggttttttcgttttcagagcaagagattacgcgcagaccaaaacgatctcaagaagatcatcttattaatcagataaaatatttctagatttcagtgcaatttatctcttcaaatgtagcacctgaagtcagccccatacgatataagttgtaattctcatgttagtcatgccccgcgcccaccggaaggagctgactgggttgaaggctctcaagggcatcggtcgagatcccggtgcctaatgagtgagctaacttacattaattgcgttgcgca

SEQ ID NO: 885 - DNA, 4114 bp, Synthetic construct
  source 1..4114: mol_type = other DNA
acacgatataaaaccatctcattgcttgctgggttaactgagttgctgaatttttttctagaatttcgcaaaatttaataggtaaaccttgtttttttaaatttacgatgatataaaaataatgccctaaacaaaggtttaggggtattgtacaggttgtcaagcctcccacaggtcttggtgaaaccaatcactgtgacgacggtaagcaacacttggatgatattcataattaactccacgctactgattacattatacagcatatctaacatttgcggcgaggttcacaatttgtatttaggtactgattgtggatgagaaggttggagaaagaccacttggttaagccggaggatgtgtcctagaattgtcgctattctgtcatcctccggttttgctaatttcattcagggaatataatgaataatgatgattacccatggttcagaaaacgtggttatttgcatttcgatgaacctgtttcattaaaaaaagcggttaaatatgtttcctctccagaaaaaataataaaacattcttttctgccatttttaagctttgaagtaaaatcgtttaaaatcaaaaaagacaaatcaacaaaacaattaagtaaaactgaaaaattaagacctattgcctattcctcacatttggatagtcatatttatgcattttacgcagaatatcttactggacattatgaattattgatccaagaaaacaatttacacgagaacatccttgccttcagatctttaaataaaagcaatatagaatttgccaagagagcatttgatacaattactgaaatgggtgagtgtagcgctgttgcattagatctttctggtttttttgacaatttagatcatcaaattttgaaacaccagtggtgcaaagttattgggactgaagcgttgccgcaagaccattttgccatatacaaaagtataacaagatattctaaagttgataaaaatagagcgtatgagattttaggtatatcaaagaataaccccaagtataatagacgcaagatctgcacccctgttgattttagaaataagattagaaaaaatggtcttattatagttaataattcccaaaaaggtataccccaaggctcgccaattagtgctctactttcaaatatatatatgcttgactttgatattgaaatgagagattacgcgcaggaacgtggtggccattattatcgctattgtgatgatatgctattcattgtaccaactaagtataataaaactctagcaggtgatgtagcccagcggattaagcatcttaaggtagaactcaatactaagaaaactgagattcgagattttatatacaaagacagtaccttagtggcaaatatgcctttacagtatcttgggtttatttttgatgggagtaatatattattacgttcatcttctctcgcaagatattcggaacgaatgaaaagaggtgtccgcttagcaaaagctacaatggacagcaagaataggattagagaaaataaaggtgaagctttaaaagctttatttaagaaaaaattatatgccagatattcacatattggaagaaggaattttttgacttatggttatcgcgccgcgaagatcatgaattcgaaagctataaaaagacagttaaaaccattgcagaaaagattggaaaatgaaatactaaaataaatatttgctggcccgaatcatacagggccacaatacagttgaaaacaagctataataaacaacatctaatttttatataccgcaataactagcataaccccttggggcctctaaacgggtcttgaggggttttttgctgaaacctcaggcatttgagaagcacacggtcacactgcttccggtagtcaataaaccggtaaaccagcaatagacataagcggctatttaacgaccctgccctgaaccgacgaccgggtcgaatttgctttcgaatttctgccattcatccgcttattatcacttattcaggcgtagcaccaggcgtttaagggcaccaataactgccttaaaaaaattacgccccgccctgccactcatcgcaatactgttgtaattcatttaacattctgccgacatggaagccatcacagacggcatgatgaacctgaatcgccagcggcatcagcaccttgtcgccttgcgtataatatttgcccatagtgaaaacgggggcgaagaagttgtccatattggccacgtttaaatcaaaactggtgaaactcacccagggattggctgagacgaaaaacatattctcaataaaccctttagggaaataggccaggttttcaccgtaacacgccacatcttgcgaatatatgtgtagaaactgccggaaatcgtcgtggtattcactccagagcgatgaaaacgtttcagtttgctcatggaaaacggtgtaacaagggtgaacactatcccatatcaccagctcaccgtctttcatcgccatacggaactctggatgagcattcatcaggcgggcaagaatgtgaataaaggccggataaaacttgtgcttatttttctttacggtctttaaaaaggccgtaatatccagctgaacggtctggttataggtacattgagcaactgactgaaatgcctcaaaatgttctttacgatgccattgggatatatcaacggtggtatatccagtgatttttttctccattttagcttccttagctcctgaaaatctcgataactcaaaaaatacgcccggtagtgatcttatttcattatggtgaaagttggaacctcttacgtgccgatcaacgtctcattttcgccaaaagttggcccagggcttcccggtatcaacagggacaccaggatttatttattctgcgaagtgatcttccgtcacaggtatttattcggcgcaaagtgcgtcgggtgatgctgccaacttactgatttagtgtatgatggtgtttttgaggtgctccagtggcttctgtttctatcagctgtccctcctgttcagctactgacggggtggtgcgtaacggcaaaagcaccgccggacatcagcgctagcggagtgtatactggcttactatgttggcactgatgagggtgtcagtgaagtgcttcatgtggcaggagaaaaaaggctgcaccggtgcgtcagcagaatatgtgatacaggatatattccgcttcctcgctcactgactcgctacgctcggtcgttcgactgcggcgagcggaaatggcttacgaacggggcggagatttcctggaagatgccaggaagatacttaacagggaagtgagagggccgcggcaaagccgtttttccataggctccgcccccctgacaagcatcacgaaatctgacgctcaaatcagtggtggcgaaacccgacaggactataaagataccaggcgtttccccctggcggctccctcgtgcgctctcctgttcctgcctttcggtttaccggtgtcattccgctgttatggccgcgtttgtctcattccacgcctgacactcagttccgggtaggcagttcgctccaagctggactgtatgcacgaaccccccgttcagtccgaccgctgcgccttatccggtaactatcgtcttgagtccaacccggaaagacatgcaaaagcaccactggcagcagccactggtaattgatttagaggagttagtcttgaagtcatgcgccggttaaggctaaactgaaaggacaagttttggtgactgcgctcctccaagccagttacctcggttcaaagagttggtagctcagagaaccttcgaaaaaccgccctgcaaggcggttttttcgttttcagagcaagagattacgcgcagaccaaaacgatctcaagaagatcatcttattaatcagataaaatatttctagatttcagtgcaatttatctcttcaaatgtagcacctgaagtcagccccatacgatataagttgtaattctcatgttagtcatgccccgcgcccaccggaaggagctgactgggttgaaggctctcaagggcatcggtcgagatcccggtgcctaatgagtgagctaacttacattaattgcgttgcgca

SEQ ID NO: 886 - DNA, 4114 bp, Synthetic construct
  source 1..4114: mol_type = other DNA
acacgatataaaaccatctcattgcttgctgggttaactgagttgctgaatttttttctagaatttcgcaaaatttaataggtaaaccttgtttttttaaatttacgatgatataaaaataatgccctaaacaaaggtttaggggtattgtacaggttgtcaagcctcccacaggtcttggtgaaaccaatcactgtgacgacggtaagcaacacttggatgatattcataatttactccacgctactgattacattatacagcatatctaacatttgcggcgaggttcacaatttgtatttaggtactgattgtggatgagaaggttggagaaagaccacttggttaagccggaggatgtgtcctagaattgtcgctattctgtcatcctccggttttgctaatttcattcagggaatataatgaataatgatgattacccatggttcagaaaacgtggttatttgcatttcgatgaacctgtttcattaaaaaaagcggttaaatatgtttcctctccagaaaaaataataaaacattcttttctgccatttttaagctttgaagtaaaatcgtttaaaatcaaaaaagacaaatcaacaaaacaattaagtaaaactgaaaaattaagacctattgcctattcctcacatttggatagtcatatttatgcattttacgcagaatatcttactggacattatgaattattgatccaagaaaacaatttacacgagaacatccttgccttcagatctttaaataaaagcaatatagaatttgccaagagagcatttgatacaattactgaaatgggtgagtgtagcgctgttgcattagatctttctggtttttttgacaatttagatcatcaaattttgaaacaccagtggtgcaaagttattgggactgaagcgttgccgcaagaccattttgccatatacaaaagtataacaagatattctaaagttgataaaaatagagcgtatgagattttaggtatatcaaagaataaccccaagtataatagacgcaagatctgcacccctgttgattttagaaataagattagaaaaaatggtcttattatagttaataattcccaaaaaggtataccccaaggctcgccaattagtgctctactttcaaatatatatatgcttgactttgatattgaaatgagagattacgcgcaggaacgtggtggccattattatcgctattgtgatgatatgctattcattgtaccaactaagtataataaaactctagcaggtgatgtagcccagcggattaagcatcttaaggtagaactcaatactaagaaaactgagattcgagattttatatacaaagacagtaccttagtggcaaatatgcctttacagtatcttgggtttatttttgatgggagtaatatattattacgttcatcttctctcgcaagatattcggaacgaatgaaaagaggtgtccgcttagcaaaagctacaatggacagcaagaataggattagagaaaataaaggtgaagctttaaaagctttatttaagaaaaaattatatgccagatattcacatattggaagaaggaattttttgacttatggttatcgcgccgcgaagatcatgaattcgaaagctataaaaagacagttaaaaccattgcagaaaagattggaaaatgaaatactaaaataaatatttgctggcccgaatcatacagggccacaatacagttgaaaacaagctataataaacaacatctaatttttatataccgcaataactagcataaccccttggggcctctaaacgggtcttgaggggttttttgctgaaacctcaggcatttgagaagcacacggtcacactgcttccggtagtcaataaaccggtaaaccagcaatagacataagcggctatttaacgaccctgccctgaaccgacgaccgggtcgaatttgctttcgaatttctgccattcatccgcttattatcacttattcaggcgtagcaccaggcgtttaagggcaccaataactgccttaaaaaaattacgccccgccctgccactcatcgcaatactgttgtaattcatttaacattctgccgacatggaagccatcacagacggcatgatgaacctgaatcgccagcggcatcagcaccttgtcgccttgcgtataatatttgcccatagtgaaaacgggggcgaagaagttgtccatattggccacgtttaaatcaaaactggtgaaactcacccagggattggctgagacgaaaaacatattctcaataaaccctttagggaaataggccaggttttcaccgtaacacgccacatcttgcgaatatatgtgtagaaactgccggaaatcgtcgtggtattcactccagagcgatgaaaacgtttcagtttgctcatggaaaacggtgtaacaagggtgaacactatcccatatcaccagctcaccgtctttcatcgccatacggaactctggatgagcattcatcaggcgggcaagaatgtgaataaaggccggataaaacttgtgcttatttttctttacggtctttaaaaaggccgtaatatccagctgaacggtctggttataggtacattgagcaactgactgaaatgcctcaaaatgttctttacgatgccattgggatatatcaacggtggtatatccagtgatttttttctccattttagcttccttagctcctgaaaatctcgataactcaaaaaatacgcccggtagtgatcttatttcattatggtgaaagttggaacctcttacgtgccgatcaacgtctcattttcgccaaaagttggcccagggcttcccggtatcaacagggacaccaggatttatttattctgcgaagtgatcttccgtcacaggtatttattcggcgcaaagtgcgtcgggtgatgctgccaacttactgatttagtgtatgatggtgtttttgaggtgctccagtggcttctgtttctatcagctgtccctcctgttcagctactgacggggtggtgcgtaacggcaaaagcaccgccggacatcagcgctagcggagtgtatactggcttactatgttggcactgatgagggtgtcagtgaagtgcttcatgtggcaggagaaaaaaggctgcaccggtgcgtcagcagaatatgtgatacaggatatattccgcttcctcgctcactgactcgctacgctcggtcgttcgactgcggcgagcggaaatggcttacgaacggggcggagatttcctggaagatgccaggaagatacttaacagggaagtgagagggccgcggcaaagccgtttttccataggctccgcccccctgacaagcatcacgaaatctgacgctcaaatcagtggtggcgaaacccgacaggactataaagataccaggcgtttccccctggcggctccctcgtgcgctctcctgttcctgcctttcggtttaccggtgtcattccgctgttatggccgcgtttgtctcattccacgcctgacactcagttccgggtaggcagttcgctccaagctggactgtatgcacgaaccccccgttcagtccgaccgctgcgccttatccggtaactatcgtcttgagtccaacccggaaagacatgcaaaagcaccactggcagcagccactggtaattgatttagaggagttagtcttgaagtcatgcgccggttaaggctaaactgaaaggacaagttttggtgactgcgctcctccaagccagttacctcggttcaaagagttggtagctcagagaaccttcgaaaaaccgccctgcaaggcggttttttcgttttcagagcaagagattacgcgcagaccaaaacgatctcaagaagatcatcttattaatcagataaaatatttctagatttcagtgcaatttatctcttcaaatgtagcacctgaagtcagccccatacgatataagttgtaattctcatgttagtcatgccccgcgcccaccggaaggagctgactgggttgaaggctctcaagggcatcggtcgagatcccggtgcctaatgagtgagctaacttacattaattgcgttgcgca

SEQ ID NO: 887 - DNA, 4114 bp, Synthetic construct
  source 1..4114: mol_type = other DNA
acacgatataaaaccatctcattgcttgctgggttaactgagttgctgaatttttttctagaatttcgcaaaatttaataggtaaaccttgtttttttaaatttacgatgatataaaaataatgccctaaacaaaggtttaggggtattgtacaggttgtcaagcctcccacaggtcttggtgaaaccaatcactgtgacgacggtaagcaacacttggatgatattcataattcactccacgctactgattacattatacagcatatctaacatttgcggcgaggttcacaatttgtatttaggtactgattgtggatgagaaggttggagaaagaccacttggttaagccggaggatgtgtcctagaattgtcgctattctgtcatcctccggttttgctaatttcattcagggaatataatgaataatgatgattacccatggttcagaaaacgtggttatttgcatttcgatgaacctgtttcattaaaaaaagcggttaaatatgtttcctctccagaaaaaataataaaacattcttttctgccatttttaagctttgaagtaaaatcgtttaaaatcaaaaaagacaaatcaacaaaacaattaagtaaaactgaaaaattaagacctattgcctattcctcacatttggatagtcatatttatgcattttacgcagaatatcttactggacattatgaattattgatccaagaaaacaatttacacgagaacatccttgccttcagatctttaaataaaagcaatatagaatttgccaagagagcatttgatacaattactgaaatgggtgagtgtagcgctgttgcattagatctttctggtttttttgacaatttagatcatcaaattttgaaacaccagtggtgcaaagttattgggactgaagcgttgccgcaagaccattttgccatatacaaaagtataacaagatattctaaagttgataaaaatagagcgtatgagattttaggtatatcaaagaataaccccaagtataatagacgcaagatctgcacccctgttgattttagaaataagattagaaaaaatggtcttattatagttaataattcccaaaaaggtataccccaaggctcgccaattagtgctctactttcaaatatatatatgcttgactttgatattgaaatgagagattacgcgcaggaacgtggtggccattattatcgctattgtgatgatatgctattcattgtaccaactaagtataataaaactctagcaggtgatgtagcccagcggattaagcatcttaaggtagaactcaatactaagaaaactgagattcgagattttatatacaaagacagtaccttagtggcaaatatgcctttacagtatcttgggtttatttttgatgggagtaatatattattacgttcatcttctctcgcaagatattcggaacgaatgaaaagaggtgtccgcttagcaaaagctacaatggacagcaagaataggattagagaaaataaaggtgaagctttaaaagctttatttaagaaaaaattatatgccagatattcacatattggaagaaggaattttttgacttatggttatcgcgccgcgaagatcatgaattcgaaagctataaaaagacagttaaaaccattgcagaaaagattggaaaatgaaatactaaaataaatatttgctggcccgaatcatacagggccacaatacagttgaaaacaagctataataaacaacatctaatttttatataccgcaataactagcataaccccttggggcctctaaacgggtcttgaggggttttttgctgaaacctcaggcatttgagaagcacacggtcacactgcttccggtagtcaataaaccggtaaaccagcaatagacataagcggctatttaacgaccctgccctgaaccgacgaccgggtcgaatttgctttcgaatttctgccattcatccgcttattatcacttattcaggcgtagcaccaggcgtttaagggcaccaataactgccttaaaaaaattacgccccgccctgccactcatcgcaatactgttgtaattcatttaacattctgccgacatggaagccatcacagacggcatgatgaacctgaatcgccagcggcatcagcaccttgtcgccttgcgtataatatttgcccatagtgaaaacgggggcgaagaagttgtccatattggccacgtttaaatcaaaactggtgaaactcacccagggattggctgagacgaaaaacatattctcaataaaccctttagggaaataggccaggttttcaccgtaacacgccacatcttgcgaatatatgtgtagaaactgccggaaatcgtcgtggtattcactccagagcgatgaaaacgtttcagtttgctcatggaaaacggtgtaacaagggtgaacactatcccatatcaccagctcaccgtctttcatcgccatacggaactctggatgagcattcatcaggcgggcaagaatgtgaataaaggccggataaaacttgtgcttatttttctttacggtctttaaaaaggccgtaatatccagctgaacggtctggttataggtacattgagcaactgactgaaatgcctcaaaatgttctttacgatgccattgggatatatcaacggtggtatatccagtgatttttttctccattttagcttccttagctcctgaaaatctcgataactcaaaaaatacgcccggtagtgatcttatttcattatggtgaaagttggaacctcttacgtgccgatcaacgtctcattttcgccaaaagttggcccagggcttcccggtatcaacagggacaccaggatttatttattctgcgaagtgatcttccgtcacaggtatttattcggcgcaaagtgcgtcgggtgatgctgccaacttactgatttagtgtatgatggtgtttttgaggtgctccagtggcttctgtttctatcagctgtccctcctgttcagctactgacggggtggtgcgtaacggcaaaagcaccgccggacatcagcgctagcggagtgtatactggcttactatgttggcactgatgagggtgtcagtgaagtgcttcatgtggcaggagaaaaaaggctgcaccggtgcgtcagcagaatatgtgatacaggatatattccgcttcctcgctcactgactcgctacgctcggtcgttcgactgcggcgagcggaaatggcttacgaacggggcggagatttcctggaagatgccaggaagatacttaacagggaagtgagagggccgcggcaaagccgtttttccataggctccgcccccctgacaagcatcacgaaatctgacgctcaaatcagtggtggcgaaacccgacaggactataaagataccaggcgtttccccctggcggctccctcgtgcgctctcctgttcctgcctttcggtttaccggtgtcattccgctgttatggccgcgtttgtctcattccacgcctgacactcagttccgggtaggcagttcgctccaagctggactgtatgcacgaaccccccgttcagtccgaccgctgcgccttatccggtaactatcgtcttgagtccaacccggaaagacatgcaaaagcaccactggcagcagccactggtaattgatttagaggagttagtcttgaagtcatgcgccggttaaggctaaactgaaaggacaagttttggtgactgcgctcctccaagccagttacctcggttcaaagagttggtagctcagagaaccttcgaaaaaccgccctgcaaggcggttttttcgttttcagagcaagagattacgcgcagaccaaaacgatctcaagaagatcatcttattaatcagataaaatatttctagatttcagtgcaatttatctcttcaaatgtagcacctgaagtcagccccatacgatataagttgtaattctcatgttagtcatgccccgcgcccaccggaaggagctgactgggttgaaggctctcaagggcatcggtcgagatcccggtgcctaatgagtgagctaacttacattaattgcgttgcgca

SEQ ID NO: 888 - DNA, 4115 bp, Synthetic construct
  source 1..4115: mol_type = other DNA
acacgatataaaaccatctcattgcttgctgggttaactgagttgctgaatttttttctagaatttcgcaaaatttaataggtaaaccttgtttttttaaatttacgatgatataaaaataatgccctaaacaaaggtttaggggtattgtacaggttgtcaagcctcccacaggtcttggtggaaaccaatcactgtgacgacggtaagcaacacttggatgatattcataattgactccacgctactgattacattatacagcatatctaacatttgcggcgaggttcacaatttgtatttaggtactgattgtggatgagaaggttggagaaagaccacttggttaagccggaggatgtgtcctagaattgtcgctattctgtcatcctccggttttgctaatttcattcagggaatataatgaataatgatgattacccatggttcagaaaacgtggttatttgcatttcgatgaacctgtttcattaaaaaaagcggttaaatatgtttcctctccagaaaaaataataaaacattcttttctgccatttttaagctttgaagtaaaatcgtttaaaatcaaaaaagacaaatcaacaaaacaattaagtaaaactgaaaaattaagacctattgcctattcctcacatttggatagtcatatttatgcattttacgcagaatatcttactggacattatgaattattgatccaagaaaacaatttacacgagaacatccttgccttcagatctttaaataaaagcaatatagaatttgccaagagagcatttgatacaattactgaaatgggtgagtgtagcgctgttgcattagatctttctggtttttttgacaatttagatcatcaaattttgaaacaccagtggtgcaaagttattgggactgaagcgttgccgcaagaccattttgccatatacaaaagtataacaagatattctaaagttgataaaaatagagcgtatgagattttaggtatatcaaagaataaccccaagtataatagacgcaagatctgcacccctgttgattttagaaataagattagaaaaaatggtcttattatagttaataattcccaaaaaggtataccccaaggctcgccaattagtgctctactttcaaatatatatatgcttgactttgatattgaaatgagagattacgcgcaggaacgtggtggccattattatcgctattgtgatgatatgctattcattgtaccaactaagtataataaaactctagcaggtgatgtagcccagcggattaagcatcttaaggtagaactcaatactaagaaaactgagattcgagattttatatacaaagacagtaccttagtggcaaatatgcctttacagtatcttgggtttatttttgatgggagtaatatattattacgttcatcttctctcgcaagatattcggaacgaatgaaaagaggtgtccgcttagcaaaagctacaatggacagcaagaataggattagagaaaataaaggtgaagctttaaaagctttatttaagaaaaaattatatgccagatattcacatattggaagaaggaattttttgacttatggttatcgcgccgcgaagatcatgaattcgaaagctataaaaagacagttaaaaccattgcagaaaagattggaaaatgaaatactaaaataaatatttgctggcccgaatcatacagggccacaatacagttgaaaacaagctataataaacaacatctaatttttatataccgcaataactagcataaccccttggggcctctaaacgggtcttgaggggttttttgctgaaacctcaggcatttgagaagcacacggtcacactgcttccggtagtcaataaaccggtaaaccagcaatagacataagcggctatttaacgaccctgccctgaaccgacgaccgggtcgaatttgctttcgaatttctgccattcatccgcttattatcacttattcaggcgtagcaccaggcgtttaagggcaccaataactgccttaaaaaaattacgccccgccctgccactcatcgcaatactgttgtaattcatttaacattctgccgacatggaagccatcacagacggcatgatgaacctgaatcgccagcggcatcagcaccttgtcgccttgcgtataatatttgcccatagtgaaaacgggggcgaagaagttgtccatattggccacgtttaaatcaaaactggtgaaactcacccagggattggctgagacgaaaaacatattctcaataaaccctttagggaaataggccaggttttcaccgtaacacgccacatcttgcgaatatatgtgtagaaactgccggaaatcgtcgtggtattcactccagagcgatgaaaacgtttcagtttgctcatggaaaacggtgtaacaagggtgaacactatcccatatcaccagctcaccgtctttcatcgccatacggaactctggatgagcattcatcaggcgggcaagaatgtgaataaaggccggataaaacttgtgcttatttttctttacggtctttaaaaaggccgtaatatccagctgaacggtctggttataggtacattgagcaactgactgaaatgcctcaaaatgttctttacgatgccattgggatatatcaacggtggtatatccagtgatttttttctccattttagcttccttagctcctgaaaatctcgataactcaaaaaatacgcccggtagtgatcttatttcattatggtgaaagttggaacctcttacgtgccgatcaacgtctcattttcgccaaaagttggcccagggcttcccggtatcaacagggacaccaggatttatttattctgcgaagtgatcttccgtcacaggtatttattcggcgcaaagtgcgtcgggtgatgctgccaacttactgatttagtgtatgatggtgtttttgaggtgctccagtggcttctgtttctatcagctgtccctcctgttcagctactgacggggtggtgcgtaacggcaaaagcaccgccggacatcagcgctagcggagtgtatactggcttactatgttggcactgatgagggtgtcagtgaagtgcttcatgtggcaggagaaaaaaggctgcaccggtgcgtcagcagaatatgtgatacaggatatattccgcttcctcgctcactgactcgctacgctcggtcgttcgactgcggcgagcggaaatggcttacgaacggggcggagatttcctggaagatgccaggaagatacttaacagggaagtgagagggccgcggcaaagccgtttttccataggctccgcccccctgacaagcatcacgaaatctgacgctcaaatcagtggtggcgaaacccgacaggactataaagataccaggcgtttccccctggcggctccctcgtgcgctctcctgttcctgcctttcggtttaccggtgtcattccgctgttatggccgcgtttgtctcattccacgcctgacactcagttccgggtaggcagttcgctccaagctggactgtatgcacgaaccccccgttcagtccgaccgctgcgccttatccggtaactatcgtcttgagtccaacccggaaagacatgcaaaagcaccactggcagcagccactggtaattgatttagaggagttagtcttgaagtcatgcgccggttaaggctaaactgaaaggacaagttttggtgactgcgctcctccaagccagttacctcggttcaaagagttggtagctcagagaaccttcgaaaaaccgccctgcaaggcggttttttcgttttcagagcaagagattacgcgcagaccaaaacgatctcaagaagatcatcttattaatcagataaaatatttctagatttcagtgcaatttatctcttcaaatgtagcacctgaagtcagccccatacgatataagttgtaattctcatgttagtcatgccccgcgcccaccggaaggagctgactgggttgaaggctctcaagggcatcggtcgagatcccggtgcctaatgagtgagctaacttacattaattgcgttgcgca

SEQ ID NO: 889 - DNA, 4116 bp, Synthetic construct
  source 1..4116: mol_type = other DNA
acacgatataaaaccatctcattgcttgctgggttaactgagttgctgaatttttttctagaatttcgcaaaatttaataggtaaaccttgtttttttaaatttacgatgatataaaaataatgccctaaacaaaggtttaggggtattgtacaggttgtcaagcctcccacaggtcttggtaggaaaccaatcactgtgacgacggtaagcaacacttggatgatattcataattgactccacgctactgattacattatacagcatatctaacatttgcggcgaggttcacaatttgtatttaggtactgattgtggatgagaaggttggagaaagaccacttggttaagccggaggatgtgtcctagaattgtcgctattctgtcatcctccggttttgctaatttcattcagggaatataatgaataatgatgattacccatggttcagaaaacgtggttatttgcatttcgatgaacctgtttcattaaaaaaagcggttaaatatgtttcctctccagaaaaaataataaaacattcttttctgccatttttaagctttgaagtaaaatcgtttaaaatcaaaaaagacaaatcaacaaaacaattaagtaaaactgaaaaattaagacctattgcctattcctcacatttggatagtcatatttatgcattttacgcagaatatcttactggacattatgaattattgatccaagaaaacaatttacacgagaacatccttgccttcagatctttaaataaaagcaatatagaatttgccaagagagcatttgatacaattactgaaatgggtgagtgtagcgctgttgcattagatctttctggtttttttgacaatttagatcatcaaattttgaaacaccagtggtgcaaagttattgggactgaagcgttgccgcaagaccattttgccatatacaaaagtataacaagatattctaaagttgataaaaatagagcgtatgagattttaggtatatcaaagaataaccccaagtataatagacgcaagatctgcacccctgttgattttagaaataagattagaaaaaatggtcttattatagttaataattcccaaaaaggtataccccaaggctcgccaattagtgctctactttcaaatatatatatgcttgactttgatattgaaatgagagattacgcgcaggaacgtggtggccattattatcgctattgtgatgatatgctattcattgtaccaactaagtataataaaactctagcaggtgatgtagcccagcggattaagcatcttaaggtagaactcaatactaagaaaactgagattcgagattttatatacaaagacagtaccttagtggcaaatatgcctttacagtatcttgggtttatttttgatgggagtaatatattattacgttcatcttctctcgcaagatattcggaacgaatgaaaagaggtgtccgcttagcaaaagctacaatggacagcaagaataggattagagaaaataaaggtgaagctttaaaagctttatttaagaaaaaattatatgccagatattcacatattggaagaaggaattttttgacttatggttatcgcgccgcgaagatcatgaattcgaaagctataaaaagacagttaaaaccattgcagaaaagattggaaaatgaaatactaaaataaatatttgctggcccgaatcatacagggccacaatacagttgaaaacaagctataataaacaacatctaatttttatataccgcaataactagcataaccccttggggcctctaaacgggtcttgaggggttttttgctgaaacctcaggcatttgagaagcacacggtcacactgcttccggtagtcaataaaccggtaaaccagcaatagacataagcggctatttaacgaccctgccctgaaccgacgaccgggtcgaatttgctttcgaatttctgccattcatccgcttattatcacttattcaggcgtagcaccaggcgtttaagggcaccaataactgccttaaaaaaattacgccccgccctgccactcatcgcaatactgttgtaattcatttaacattctgccgacatggaagccatcacagacggcatgatgaacctgaatcgccagcggcatcagcaccttgtcgccttgcgtataatatttgcccatagtgaaaacgggggcgaagaagttgtccatattggccacgtttaaatcaaaactggtgaaactcacccagggattggctgagacgaaaaacatattctcaataaaccctttagggaaataggccaggttttcaccgtaacacgccacatcttgcgaatatatgtgtagaaactgccggaaatcgtcgtggtattcactccagagcgatgaaaacgtttcagtttgctcatggaaaacggtgtaacaagggtgaacactatcccatatcaccagctcaccgtctttcatcgccatacggaactctggatgagcattcatcaggcgggcaagaatgtgaataaaggccggataaaacttgtgcttatttttctttacggtctttaaaaaggccgtaatatccagctgaacggtctggttataggtacattgagcaactgactgaaatgcctcaaaatgttctttacgatgccattgggatatatcaacggtggtatatccagtgatttttttctccattttagcttccttagctcctgaaaatctcgataactcaaaaaatacgcccggtagtgatcttatttcattatggtgaaagttggaacctcttacgtgccgatcaacgtctcattttcgccaaaagttggcccagggcttcccggtatcaacagggacaccaggatttatttattctgcgaagtgatcttccgtcacaggtatttattcggcgcaaagtgcgtcgggtgatgctgccaacttactgatttagtgtatgatggtgtttttgaggtgctccagtggcttctgtttctatcagctgtccctcctgttcagctactgacggggtggtgcgtaacggcaaaagcaccgccggacatcagcgctagcggagtgtatactggcttactatgttggcactgatgagggtgtcagtgaagtgcttcatgtggcaggagaaaaaaggctgcaccggtgcgtcagcagaatatgtgatacaggatatattccgcttcctcgctcactgactcgctacgctcggtcgttcgactgcggcgagcggaaatggcttacgaacggggcggagatttcctggaagatgccaggaagatacttaacagggaagtgagagggccgcggcaaagccgtttttccataggctccgcccccctgacaagcatcacgaaatctgacgctcaaatcagtggtggcgaaacccgacaggactataaagataccaggcgtttccccctggcggctccctcgtgcgctctcctgttcctgcctttcggtttaccggtgtcattccgctgttatggccgcgtttgtctcattccacgcctgacactcagttccgggtaggcagttcgctccaagctggactgtatgcacgaaccccccgttcagtccgaccgctgcgccttatccggtaactatcgtcttgagtccaacccggaaagacatgcaaaagcaccactggcagcagccactggtaattgatttagaggagttagtcttgaagtcatgcgccggttaaggctaaactgaaaggacaagttttggtgactgcgctcctccaagccagttacctcggttcaaagagttggtagctcagagaaccttcgaaaaaccgccctgcaaggcggttttttcgttttcagagcaagagattacgcgcagaccaaaacgatctcaagaagatcatcttattaatcagataaaatatttctagatttcagtgcaatttatctcttcaaatgtagcacctgaagtcagccccatacgatataagttgtaattctcatgttagtcatgccccgcgcccaccggaaggagctgactgggttgaaggctctcaagggcatcggtcgagatcccggtgcctaatgagtgagctaacttacattaattgcgttgcgca

SEQ ID NO: 890 - DNA, 4117 bp, Synthetic construct
  source 1..4117: mol_type = other DNA
acacgatataaaaccatctcattgcttgctgggttaactgagttgctgaatttttttctagaatttcgcaaaatttaataggtaaaccttgtttttttaaatttacgatgatataaaaataatgccctaaacaaaggtttaggggtattgtacaggttgtcaagcctcccacaggtcttggtaaggaaaccaatcactgtgacgacggtaagcaacacttggatgatattcataattgactccacgctactgattacattatacagcatatctaacatttgcggcgaggttcacaatttgtatttaggtactgattgtggatgagaaggttggagaaagaccacttggttaagccggaggatgtgtcctagaattgtcgctattctgtcatcctccggttttgctaatttcattcagggaatataatgaataatgatgattacccatggttcagaaaacgtggttatttgcatttcgatgaacctgtttcattaaaaaaagcggttaaatatgtttcctctccagaaaaaataataaaacattcttttctgccatttttaagctttgaagtaaaatcgtttaaaatcaaaaaagacaaatcaacaaaacaattaagtaaaactgaaaaattaagacctattgcctattcctcacatttggatagtcatatttatgcattttacgcagaatatcttactggacattatgaattattgatccaagaaaacaatttacacgagaacatccttgccttcagatctttaaataaaagcaatatagaatttgccaagagagcatttgatacaattactgaaatgggtgagtgtagcgctgttgcattagatctttctggtttttttgacaatttagatcatcaaattttgaaacaccagtggtgcaaagttattgggactgaagcgttgccgcaagaccattttgccatatacaaaagtataacaagatattctaaagttgataaaaatagagcgtatgagattttaggtatatcaaagaataaccccaagtataatagacgcaagatctgcacccctgttgattttagaaataagattagaaaaaatggtcttattatagttaataattcccaaaaaggtataccccaaggctcgccaattagtgctctactttcaaatatatatatgcttgactttgatattgaaatgagagattacgcgcaggaacgtggtggccattattatcgctattgtgatgatatgctattcattgtaccaactaagtataataaaactctagcaggtgatgtagcccagcggattaagcatcttaaggtagaactcaatactaagaaaactgagattcgagattttatatacaaagacagtaccttagtggcaaatatgcctttacagtatcttgggtttatttttgatgggagtaatatattattacgttcatcttctctcgcaagatattcggaacgaatgaaaagaggtgtccgcttagcaaaagctacaatggacagcaagaataggattagagaaaataaaggtgaagctttaaaagctttatttaagaaaaaattatatgccagatattcacatattggaagaaggaattttttgacttatggttatcgcgccgcgaagatcatgaattcgaaagctataaaaagacagttaaaaccattgcagaaaagattggaaaatgaaatactaaaataaatatttgctggcccgaatcatacagggccacaatacagttgaaaacaagctataataaacaacatctaatttttatataccgcaataactagcataaccccttggggcctctaaacgggtcttgaggggttttttgctgaaacctcaggcatttgagaagcacacggtcacactgcttccggtagtcaataaaccggtaaaccagcaatagacataagcggctatttaacgaccctgccctgaaccgacgaccgggtcgaatttgctttcgaatttctgccattcatccgcttattatcacttattcaggcgtagcaccaggcgtttaagggcaccaataactgccttaaaaaaattacgccccgccctgccactcatcgcaatactgttgtaattcatttaacattctgccgacatggaagccatcacagacggcatgatgaacctgaatcgccagcggcatcagcaccttgtcgccttgcgtataatatttgcccatagtgaaaacgggggcgaagaagttgtccatattggccacgtttaaatcaaaactggtgaaactcacccagggattggctgagacgaaaaacatattctcaataaaccctttagggaaataggccaggttttcaccgtaacacgccacatcttgcgaatatatgtgtagaaactgccggaaatcgtcgtggtattcactccagagcgatgaaaacgtttcagtttgctcatggaaaacggtgtaacaagggtgaacactatcccatatcaccagctcaccgtctttcatcgccatacggaactctggatgagcattcatcaggcgggcaagaatgtgaataaaggccggataaaacttgtgcttatttttctttacggtctttaaaaaggccgtaatatccagctgaacggtctggttataggtacattgagcaactgactgaaatgcctcaaaatgttctttacgatgccattgggatatatcaacggtggtatatccagtgatttttttctccattttagcttccttagctcctgaaaatctcgataactcaaaaaatacgcccggtagtgatcttatttcattatggtgaaagttggaacctcttacgtgccgatcaacgtctcattttcgccaaaagttggcccagggcttcccggtatcaacagggacaccaggatttatttattctgcgaagtgatcttccgtcacaggtatttattcggcgcaaagtgcgtcgggtgatgctgccaacttactgatttagtgtatgatggtgtttttgaggtgctccagtggcttctgtttctatcagctgtccctcctgttcagctactgacggggtggtgcgtaacggcaaaagcaccgccggacatcagcgctagcggagtgtatactggcttactatgttggcactgatgagggtgtcagtgaagtgcttcatgtggcaggagaaaaaaggctgcaccggtgcgtcagcagaatatgtgatacaggatatattccgcttcctcgctcactgactcgctacgctcggtcgttcgactgcggcgagcggaaatggcttacgaacggggcggagatttcctggaagatgccaggaagatacttaacagggaagtgagagggccgcggcaaagccgtttttccataggctccgcccccctgacaagcatcacgaaatctgacgctcaaatcagtggtggcgaaacccgacaggactataaagataccaggcgtttccccctggcggctccctcgtgcgctctcctgttcctgcctttcggtttaccggtgtcattccgctgttatggccgcgtttgtctcattccacgcctgacactcagttccgggtaggcagttcgctccaagctggactgtatgcacgaaccccccgttcagtccgaccgctgcgccttatccggtaactatcgtcttgagtccaacccggaaagacatgcaaaagcaccactggcagcagccactggtaattgatttagaggagttagtcttgaagtcatgcgccggttaaggctaaactgaaaggacaagttttggtgactgcgctcctccaagccagttacctcggttcaaagagttggtagctcagagaaccttcgaaaaaccgccctgcaaggcggttttttcgttttcagagcaagagattacgcgcagaccaaaacgatctcaagaagatcatcttattaatcagataaaatatttctagatttcagtgcaatttatctcttcaaatgtagcacctgaagtcagccccatacgatataagttgtaattctcatgttagtcatgccccgcgcccaccggaaggagctgactgggttgaaggctctcaagggcatcggtcgagatcccggtgcctaatgagtgagctaacttacattaattgcgttgcgca

SEQ ID NO: 891 - DNA, 4118 bp, Synthetic construct
  source 1..4118: mol_type = other DNA
acacgatataaaaccatctcattgcttgctgggttaactgagttgctgaatttttttctagaatttcgcaaaatttaataggtaaaccttgtttttttaaatttacgatgatataaaaataatgccctaaacaaaggtttaggggtattgtacaggttgtcaagcctcccacaggtcttggtcaaggaaaccaatcactgtgacgacggtaagcaacacttggatgatattcataattgactccacgctactgattacattatacagcatatctaacatttgcggcgaggttcacaatttgtatttaggtactgattgtggatgagaaggttggagaaagaccacttggttaagccggaggatgtgtcctagaattgtcgctattctgtcatcctccggttttgctaatttcattcagggaatataatgaataatgatgattacccatggttcagaaaacgtggttatttgcatttcgatgaacctgtttcattaaaaaaagcggttaaatatgtttcctctccagaaaaaataataaaacattcttttctgccatttttaagctttgaagtaaaatcgtttaaaatcaaaaaagacaaatcaacaaaacaattaagtaaaactgaaaaattaagacctattgcctattcctcacatttggatagtcatatttatgcattttacgcagaatatcttactggacattatgaattattgatccaagaaaacaatttacacgagaacatccttgccttcagatctttaaataaaagcaatatagaatttgccaagagagcatttgatacaattactgaaatgggtgagtgtagcgctgttgcattagatctttctggtttttttgacaatttagatcatcaaattttgaaacaccagtggtgcaaagttattgggactgaagcgttgccgcaagaccattttgccatatacaaaagtataacaagatattctaaagttgataaaaatagagcgtatgagattttaggtatatcaaagaataaccccaagtataatagacgcaagatctgcacccctgttgattttagaaataagattagaaaaaatggtcttattatagttaataattcccaaaaaggtataccccaaggctcgccaattagtgctctactttcaaatatatatatgcttgactttgatattgaaatgagagattacgcgcaggaacgtggtggccattattatcgctattgtgatgatatgctattcattgtaccaactaagtataataaaactctagcaggtgatgtagcccagcggattaagcatcttaaggtagaactcaatactaagaaaactgagattcgagattttatatacaaagacagtaccttagtggcaaatatgcctttacagtatcttgggtttatttttgatgggagtaatatattattacgttcatcttctctcgcaagatattcggaacgaatgaaaagaggtgtccgcttagcaaaagctacaatggacagcaagaataggattagagaaaataaaggtgaagctttaaaagctttatttaagaaaaaattatatgccagatattcacatattggaagaaggaattttttgacttatggttatcgcgccgcgaagatcatgaattcgaaagctataaaaagacagttaaaaccattgcagaaaagattggaaaatgaaatactaaaataaatatttgctggcccgaatcatacagggccacaatacagttgaaaacaagctataataaacaacatctaatttttatataccgcaataactagcataaccccttggggcctctaaacgggtcttgaggggttttttgctgaaacctcaggcatttgagaagcacacggtcacactgcttccggtagtcaataaaccggtaaaccagcaatagacataagcggctatttaacgaccctgccctgaaccgacgaccgggtcgaatttgctttcgaatttctgccattcatccgcttattatcacttattcaggcgtagcaccaggcgtttaagggcaccaataactgccttaaaaaaattacgccccgccctgccactcatcgcaatactgttgtaattcatttaacattctgccgacatggaagccatcacagacggcatgatgaacctgaatcgccagcggcatcagcaccttgtcgccttgcgtataatatttgcccatagtgaaaacgggggcgaagaagttgtccatattggccacgtttaaatcaaaactggtgaaactcacccagggattggctgagacgaaaaacatattctcaataaaccctttagggaaataggccaggttttcaccgtaacacgccacatcttgcgaatatatgtgtagaaactgccggaaatcgtcgtggtattcactccagagcgatgaaaacgtttcagtttgctcatggaaaacggtgtaacaagggtgaacactatcccatatcaccagctcaccgtctttcatcgccatacggaactctggatgagcattcatcaggcgggcaagaatgtgaataaaggccggataaaacttgtgcttatttttctttacggtctttaaaaaggccgtaatatccagctgaacggtctggttataggtacattgagcaactgactgaaatgcctcaaaatgttctttacgatgccattgggatatatcaacggtggtatatccagtgatttttttctccattttagcttccttagctcctgaaaatctcgataactcaaaaaatacgcccggtagtgatcttatttcattatggtgaaagttggaacctcttacgtgccgatcaacgtctcattttcgccaaaagttggcccagggcttcccggtatcaacagggacaccaggatttatttattctgcgaagtgatcttccgtcacaggtatttattcggcgcaaagtgcgtcgggtgatgctgccaacttactgatttagtgtatgatggtgtttttgaggtgctccagtggcttctgtttctatcagctgtccctcctgttcagctactgacggggtggtgcgtaacggcaaaagcaccgccggacatcagcgctagcggagtgtatactggcttactatgttggcactgatgagggtgtcagtgaagtgcttcatgtggcaggagaaaaaaggctgcaccggtgcgtcagcagaatatgtgatacaggatatattccgcttcctcgctcactgactcgctacgctcggtcgttcgactgcggcgagcggaaatggcttacgaacggggcggagatttcctggaagatgccaggaagatacttaacagggaagtgagagggccgcggcaaagccgtttttccataggctccgcccccctgacaagcatcacgaaatctgacgctcaaatcagtggtggcgaaacccgacaggactataaagataccaggcgtttccccctggcggctccctcgtgcgctctcctgttcctgcctttcggtttaccggtgtcattccgctgttatggccgcgtttgtctcattccacgcctgacactcagttccgggtaggcagttcgctccaagctggactgtatgcacgaaccccccgttcagtccgaccgctgcgccttatccggtaactatcgtcttgagtccaacccggaaagacatgcaaaagcaccactggcagcagccactggtaattgatttagaggagttagtcttgaagtcatgcgccggttaaggctaaactgaaaggacaagttttggtgactgcgctcctccaagccagttacctcggttcaaagagttggtagctcagagaaccttcgaaaaaccgccctgcaaggcggttttttcgttttcagagcaagagattacgcgcagaccaaaacgatctcaagaagatcatcttattaatcagataaaatatttctagatttcagtgcaatttatctcttcaaatgtagcacctgaagtcagccccatacgatataagttgtaattctcatgttagtcatgccccgcgcccaccggaaggagctgactgggttgaaggctctcaagggcatcggtcgagatcccggtgcctaatgagtgagctaacttacattaattgcgttgcgca

SEQ ID NO: 892 - DNA, 4119 bp, Synthetic construct
  source 1..4119: mol_type = other DNA
acacgatataaaaccatctcattgcttgctgggttaactgagttgctgaatttttttctagaatttcgcaaaatttaataggtaaaccttgtttttttaaatttacgatgatataaaaataatgccctaaacaaaggtttaggggtattgtacaggttgtcaagcctcccacaggtcttggtgcaaggaaaccaatcactgtgacgacggtaagcaacacttggatgatattcataattgactccacgctactgattacattatacagcatatctaacatttgcggcgaggttcacaatttgtatttaggtactgattgtggatgagaaggttggagaaagaccacttggttaagccggaggatgtgtcctagaattgtcgctattctgtcatcctccggttttgctaatttcattcagggaatataatgaataatgatgattacccatggttcagaaaacgtggttatttgcatttcgatgaacctgtttcattaaaaaaagcggttaaatatgtttcctctccagaaaaaataataaaacattcttttctgccatttttaagctttgaagtaaaatcgtttaaaatcaaaaaagacaaatcaacaaaacaattaagtaaaactgaaaaattaagacctattgcctattcctcacatttggatagtcatatttatgcattttacgcagaatatcttactggacattatgaattattgatccaagaaaacaatttacacgagaacatccttgccttcagatctttaaataaaagcaatatagaatttgccaagagagcatttgatacaattactgaaatgggtgagtgtagcgctgttgcattagatctttctggtttttttgacaatttagatcatcaaattttgaaacaccagtggtgcaaagttattgggactgaagcgttgccgcaagaccattttgccatatacaaaagtataacaagatattctaaagttgataaaaatagagcgtatgagattttaggtatatcaaagaataaccccaagtataatagacgcaagatctgcacccctgttgattttagaaataagattagaaaaaatggtcttattatagttaataattcccaaaaaggtataccccaaggctcgccaattagtgctctactttcaaatatatatatgcttgactttgatattgaaatgagagattacgcgcaggaacgtggtggccattattatcgctattgtgatgatatgctattcattgtaccaactaagtataataaaactctagcaggtgatgtagcccagcggattaagcatcttaaggtagaactcaatactaagaaaactgagattcgagattttatatacaaagacagtaccttagtggcaaatatgcctttacagtatcttgggtttatttttgatgggagtaatatattattacgttcatcttctctcgcaagatattcggaacgaatgaaaagaggtgtccgcttagcaaaagctacaatggacagcaagaataggattagagaaaataaaggtgaagctttaaaagctttatttaagaaaaaattatatgccagatattcacatattggaagaaggaattttttgacttatggttatcgcgccgcgaagatcatgaattcgaaagctataaaaagacagttaaaaccattgcagaaaagattggaaaatgaaatactaaaataaatatttgctggcccgaatcatacagggccacaatacagttgaaaacaagctataataaacaacatctaatttttatataccgcaataactagcataaccccttggggcctctaaacgggtcttgaggggttttttgctgaaacctcaggcatttgagaagcacacggtcacactgcttccggtagtcaataaaccggtaaaccagcaatagacataagcggctatttaacgaccctgccctgaaccgacgaccgggtcgaatttgctttcgaatttctgccattcatccgcttattatcacttattcaggcgtagcaccaggcgtttaagggcaccaataactgccttaaaaaaattacgccccgccctgccactcatcgcaatactgttgtaattcatttaacattctgccgacatggaagccatcacagacggcatgatgaacctgaatcgccagcggcatcagcaccttgtcgccttgcgtataatatttgcccatagtgaaaacgggggcgaagaagttgtccatattggccacgtttaaatcaaaactggtgaaactcacccagggattggctgagacgaaaaacatattctcaataaaccctttagggaaataggccaggttttcaccgtaacacgccacatcttgcgaatatatgtgtagaaactgccggaaatcgtcgtggtattcactccagagcgatgaaaacgtttcagtttgctcatggaaaacggtgtaacaagggtgaacactatcccatatcaccagctcaccgtctttcatcgccatacggaactctggatgagcattcatcaggcgggcaagaatgtgaataaaggccggataaaacttgtgcttatttttctttacggtctttaaaaaggccgtaatatccagctgaacggtctggttataggtacattgagcaactgactgaaatgcctcaaaatgttctttacgatgccattgggatatatcaacggtggtatatccagtgatttttttctccattttagcttccttagctcctgaaaatctcgataactcaaaaaatacgcccggtagtgatcttatttcattatggtgaaagttggaacctcttacgtgccgatcaacgtctcattttcgccaaaagttggcccagggcttcccggtatcaacagggacaccaggatttatttattctgcgaagtgatcttccgtcacaggtatttattcggcgcaaagtgcgtcgggtgatgctgccaacttactgatttagtgtatgatggtgtttttgaggtgctccagtggcttctgtttctatcagctgtccctcctgttcagctactgacggggtggtgcgtaacggcaaaagcaccgccggacatcagcgctagcggagtgtatactggcttactatgttggcactgatgagggtgtcagtgaagtgcttcatgtggcaggagaaaaaaggctgcaccggtgcgtcagcagaatatgtgatacaggatatattccgcttcctcgctcactgactcgctacgctcggtcgttcgactgcggcgagcggaaatggcttacgaacggggcggagatttcctggaagatgccaggaagatacttaacagggaagtgagagggccgcggcaaagccgtttttccataggctccgcccccctgacaagcatcacgaaatctgacgctcaaatcagtggtggcgaaacccgacaggactataaagataccaggcgtttccccctggcggctccctcgtgcgctctcctgttcctgcctttcggtttaccggtgtcattccgctgttatggccgcgtttgtctcattccacgcctgacactcagttccgggtaggcagttcgctccaagctggactgtatgcacgaaccccccgttcagtccgaccgctgcgccttatccggtaactatcgtcttgagtccaacccggaaagacatgcaaaagcaccactggcagcagccactggtaattgatttagaggagttagtcttgaagtcatgcgccggttaaggctaaactgaaaggacaagttttggtgactgcgctcctccaagccagttacctcggttcaaagagttggtagctcagagaaccttcgaaaaaccgccctgcaaggcggttttttcgttttcagagcaagagattacgcgcagaccaaaacgatctcaagaagatcatcttattaatcagataaaatatttctagatttcagtgcaatttatctcttcaaatgtagcacctgaagtcagccccatacgatataagttgtaattctcatgttagtcatgccccgcgcccaccggaaggagctgactgggttgaaggctctcaagggcatcggtcgagatcccggtgcctaatgagtgagctaacttacattaattgcgttgcgca

SEQ ID NO: 893 - DNA, 4120 bp, Synthetic construct
  source 1..4120: mol_type = other DNA
acacgatataaaaccatctcattgcttgctgggttaactgagttgctgaatttttttctagaatttcgcaaaatttaataggtaaaccttgtttttttaaatttacgatgatataaaaataatgccctaaacaaaggtttaggggtattgtacaggttgtcaagcctcccacaggtcttggtagcaaggaaaccaatcactgtgacgacggtaagcaacacttggatgatattcataattgactccacgctactgattacattatacagcatatctaacatttgcggcgaggttcacaatttgtatttaggtactgattgtggatgagaaggttggagaaagaccacttggttaagccggaggatgtgtcctagaattgtcgctattctgtcatcctccggttttgctaatttcattcagggaatataatgaataatgatgattacccatggttcagaaaacgtggttatttgcatttcgatgaacctgtttcattaaaaaaagcggttaaatatgtttcctctccagaaaaaataataaaacattcttttctgccatttttaagctttgaagtaaaatcgtttaaaatcaaaaaagacaaatcaacaaaacaattaagtaaaactgaaaaattaagacctattgcctattcctcacatttggatagtcatatttatgcattttacgcagaatatcttactggacattatgaattattgatccaagaaaacaatttacacgagaacatccttgccttcagatctttaaataaaagcaatatagaatttgccaagagagcatttgatacaattactgaaatgggtgagtgtagcgctgttgcattagatctttctggtttttttgacaatttagatcatcaaattttgaaacaccagtggtgcaaagttattgggactgaagcgttgccgcaagaccattttgccatatacaaaagtataacaagatattctaaagttgataaaaatagagcgtatgagattttaggtatatcaaagaataaccccaagtataatagacgcaagatctgcacccctgttgattttagaaataagattagaaaaaatggtcttattatagttaataattcccaaaaaggtataccccaaggctcgccaattagtgctctactttcaaatatatatatgcttgactttgatattgaaatgagagattacgcgcaggaacgtggtggccattattatcgctattgtgatgatatgctattcattgtaccaactaagtataataaaactctagcaggtgatgtagcccagcggattaagcatcttaaggtagaactcaatactaagaaaactgagattcgagattttatatacaaagacagtaccttagtggcaaatatgcctttacagtatcttgggtttatttttgatgggagtaatatattattacgttcatcttctctcgcaagatattcggaacgaatgaaaagaggtgtccgcttagcaaaagctacaatggacagcaagaataggattagagaaaataaaggtgaagctttaaaagctttatttaagaaaaaattatatgccagatattcacatattggaagaaggaattttttgacttatggttatcgcgccgcgaagatcatgaattcgaaagctataaaaagacagttaaaaccattgcagaaaagattggaaaatgaaatactaaaataaatatttgctggcccgaatcatacagggccacaatacagttgaaaacaagctataataaacaacatctaatttttatataccgcaataactagcataaccccttggggcctctaaacgggtcttgaggggttttttgctgaaacctcaggcatttgagaagcacacggtcacactgcttccggtagtcaataaaccggtaaaccagcaatagacataagcggctatttaacgaccctgccctgaaccgacgaccgggtcgaatttgctttcgaatttctgccattcatccgcttattatcacttattcaggcgtagcaccaggcgtttaagggcaccaataactgccttaaaaaaattacgccccgccctgccactcatcgcaatactgttgtaattcatttaacattctgccgacatggaagccatcacagacggcatgatgaacctgaatcgccagcggcatcagcaccttgtcgccttgcgtataatatttgcccatagtgaaaacgggggcgaagaagttgtccatattggccacgtttaaatcaaaactggtgaaactcacccagggattggctgagacgaaaaacatattctcaataaaccctttagggaaataggccaggttttcaccgtaacacgccacatcttgcgaatatatgtgtagaaactgccggaaatcgtcgtggtattcactccagagcgatgaaaacgtttcagtttgctcatggaaaacggtgtaacaagggtgaacactatcccatatcaccagctcaccgtctttcatcgccatacggaactctggatgagcattcatcaggcgggcaagaatgtgaataaaggccggataaaacttgtgcttatttttctttacggtctttaaaaaggccgtaatatccagctgaacggtctggttataggtacattgagcaactgactgaaatgcctcaaaatgttctttacgatgccattgggatatatcaacggtggtatatccagtgatttttttctccattttagcttccttagctcctgaaaatctcgataactcaaaaaatacgcccggtagtgatcttatttcattatggtgaaagttggaacctcttacgtgccgatcaacgtctcattttcgccaaaagttggcccagggcttcccggtatcaacagggacaccaggatttatttattctgcgaagtgatcttccgtcacaggtatttattcggcgcaaagtgcgtcgggtgatgctgccaacttactgatttagtgtatgatggtgtttttgaggtgctccagtggcttctgtttctatcagctgtccctcctgttcagctactgacggggtggtgcgtaacggcaaaagcaccgccggacatcagcgctagcggagtgtatactggcttactatgttggcactgatgagggtgtcagtgaagtgcttcatgtggcaggagaaaaaaggctgcaccggtgcgtcagcagaatatgtgatacaggatatattccgcttcctcgctcactgactcgctacgctcggtcgttcgactgcggcgagcggaaatggcttacgaacggggcggagatttcctggaagatgccaggaagatacttaacagggaagtgagagggccgcggcaaagccgtttttccataggctccgcccccctgacaagcatcacgaaatctgacgctcaaatcagtggtggcgaaacccgacaggactataaagataccaggcgtttccccctggcggctccctcgtgcgctctcctgttcctgcctttcggtttaccggtgtcattccgctgttatggccgcgtttgtctcattccacgcctgacactcagttccgggtaggcagttcgctccaagctggactgtatgcacgaaccccccgttcagtccgaccgctgcgccttatccggtaactatcgtcttgagtccaacccggaaagacatgcaaaagcaccactggcagcagccactggtaattgatttagaggagttagtcttgaagtcatgcgccggttaaggctaaactgaaaggacaagttttggtgactgcgctcctccaagccagttacctcggttcaaagagttggtagctcagagaaccttcgaaaaaccgccctgcaaggcggttttttcgttttcagagcaagagattacgcgcagaccaaaacgatctcaagaagatcatcttattaatcagataaaatatttctagatttcagtgcaatttatctcttcaaatgtagcacctgaagtcagccccatacgatataagttgtaattctcatgttagtcatgccccgcgcccaccggaaggagctgactgggttgaaggctctcaagggcatcggtcgagatcccggtgcctaatgagtgagctaacttacattaattgcgttgcgca

SEQ ID NO: 894 - DNA, 4121 bp, Synthetic construct
  source 1..4121: mol_type = other DNA
acacgatataaaaccatctcattgcttgctgggttaactgagttgctgaatttttttctagaatttcgcaaaatttaataggtaaaccttgtttttttaaatttacgatgatataaaaataatgccctaaacaaaggtttaggggtattgtacaggttgtcaagcctcccacaggtcttggtcagcaaggaaaccaatcactgtgacgacggtaagcaacacttggatgatattcataattgactccacgctactgattacattatacagcatatctaacatttgcggcgaggttcacaatttgtatttaggtactgattgtggatgagaaggttggagaaagaccacttggttaagccggaggatgtgtcctagaattgtcgctattctgtcatcctccggttttgctaatttcattcagggaatataatgaataatgatgattacccatggttcagaaaacgtggttatttgcatttcgatgaacctgtttcattaaaaaaagcggttaaatatgtttcctctccagaaaaaataataaaacattcttttctgccatttttaagctttgaagtaaaatcgtttaaaatcaaaaaagacaaatcaacaaaacaattaagtaaaactgaaaaattaagacctattgcctattcctcacatttggatagtcatatttatgcattttacgcagaatatcttactggacattatgaattattgatccaagaaaacaatttacacgagaacatccttgccttcagatctttaaataaaagcaatatagaatttgccaagagagcatttgatacaattactgaaatgggtgagtgtagcgctgttgcattagatctttctggtttttttgacaatttagatcatcaaattttgaaacaccagtggtgcaaagttattgggactgaagcgttgccgcaagaccattttgccatatacaaaagtataacaagatattctaaagttgataaaaatagagcgtatgagattttaggtatatcaaagaataaccccaagtataatagacgcaagatctgcacccctgttgattttagaaataagattagaaaaaatggtcttattatagttaataattcccaaaaaggtataccccaaggctcgccaattagtgctctactttcaaatatatatatgcttgactttgatattgaaatgagagattacgcgcaggaacgtggtggccattattatcgctattgtgatgatatgctattcattgtaccaactaagtataataaaactctagcaggtgatgtagcccagcggattaagcatcttaaggtagaactcaatactaagaaaactgagattcgagattttatatacaaagacagtaccttagtggcaaatatgcctttacagtatcttgggtttatttttgatgggagtaatatattattacgttcatcttctctcgcaagatattcggaacgaatgaaaagaggtgtccgcttagcaaaagctacaatggacagcaagaataggattagagaaaataaaggtgaagctttaaaagctttatttaagaaaaaattatatgccagatattcacatattggaagaaggaattttttgacttatggttatcgcgccgcgaagatcatgaattcgaaagctataaaaagacagttaaaaccattgcagaaaagattggaaaatgaaatactaaaataaatatttgctggcccgaatcatacagggccacaatacagttgaaaacaagctataataaacaacatctaatttttatataccgcaataactagcataaccccttggggcctctaaacgggtcttgaggggttttttgctgaaacctcaggcatttgagaagcacacggtcacactgcttccggtagtcaataaaccggtaaaccagcaatagacataagcggctatttaacgaccctgccctgaaccgacgaccgggtcgaatttgctttcgaatttctgccattcatccgcttattatcacttattcaggcgtagcaccaggcgtttaagggcaccaataactgccttaaaaaaattacgccccgccctgccactcatcgcaatactgttgtaattcatttaacattctgccgacatggaagccatcacagacggcatgatgaacctgaatcgccagcggcatcagcaccttgtcgccttgcgtataatatttgcccatagtgaaaacgggggcgaagaagttgtccatattggccacgtttaaatcaaaactggtgaaactcacccagggattggctgagacgaaaaacatattctcaataaaccctttagggaaataggccaggttttcaccgtaacacgccacatcttgcgaatatatgtgtagaaactgccggaaatcgtcgtggtattcactccagagcgatgaaaacgtttcagtttgctcatggaaaacggtgtaacaagggtgaacactatcccatatcaccagctcaccgtctttcatcgccatacggaactctggatgagcattcatcaggcgggcaagaatgtgaataaaggccggataaaacttgtgcttatttttctttacggtctttaaaaaggccgtaatatccagctgaacggtctggttataggtacattgagcaactgactgaaatgcctcaaaatgttctttacgatgccattgggatatatcaacggtggtatatccagtgatttttttctccattttagcttccttagctcctgaaaatctcgataactcaaaaaatacgcccggtagtgatcttatttcattatggtgaaagttggaacctcttacgtgccgatcaacgtctcattttcgccaaaagttggcccagggcttcccggtatcaacagggacaccaggatttatttattctgcgaagtgatcttccgtcacaggtatttattcggcgcaaagtgcgtcgggtgatgctgccaacttactgatttagtgtatgatggtgtttttgaggtgctccagtggcttctgtttctatcagctgtccctcctgttcagctactgacggggtggtgcgtaacggcaaaagcaccgccggacatcagcgctagcggagtgtatactggcttactatgttggcactgatgagggtgtcagtgaagtgcttcatgtggcaggagaaaaaaggctgcaccggtgcgtcagcagaatatgtgatacaggatatattccgcttcctcgctcactgactcgctacgctcggtcgttcgactgcggcgagcggaaatggcttacgaacggggcggagatttcctggaagatgccaggaagatacttaacagggaagtgagagggccgcggcaaagccgtttttccataggctccgcccccctgacaagcatcacgaaatctgacgctcaaatcagtggtggcgaaacccgacaggactataaagataccaggcgtttccccctggcggctccctcgtgcgctctcctgttcctgcctttcggtttaccggtgtcattccgctgttatggccgcgtttgtctcattccacgcctgacactcagttccgggtaggcagttcgctccaagctggactgtatgcacgaaccccccgttcagtccgaccgctgcgccttatccggtaactatcgtcttgagtccaacccggaaagacatgcaaaagcaccactggcagcagccactggtaattgatttagaggagttagtcttgaagtcatgcgccggttaaggctaaactgaaaggacaagttttggtgactgcgctcctccaagccagttacctcggttcaaagagttggtagctcagagaaccttcgaaaaaccgccctgcaaggcggttttttcgttttcagagcaagagattacgcgcagaccaaaacgatctcaagaagatcatcttattaatcagataaaatatttctagatttcagtgcaatttatctcttcaaatgtagcacctgaagtcagccccatacgatataagttgtaattctcatgttagtcatgccccgcgcccaccggaaggagctgactgggttgaaggctctcaagggcatcggtcgagatcccggtgcctaatgagtgagctaacttacattaattgcgttgcgca

SEQ ID NO: 895 - DNA, 4122 bp, Synthetic construct
  source 1..4122: mol_type = other DNA
acacgatataaaaccatctcattgcttgctgggttaactgagttgctgaatttttttctagaatttcgcaaaatttaataggtaaaccttgtttttttaaatttacgatgatataaaaataatgccctaaacaaaggtttaggggtattgtacaggttgtcaagcctcccacaggtcttggtgcagcaaggaaaccaatcactgtgacgacggtaagcaacacttggatgatattcataattgactccacgctactgattacattatacagcatatctaacatttgcggcgaggttcacaatttgtatttaggtactgattgtggatgagaaggttggagaaagaccacttggttaagccggaggatgtgtcctagaattgtcgctattctgtcatcctccggttttgctaatttcattcagggaatataatgaataatgatgattacccatggttcagaaaacgtggttatttgcatttcgatgaacctgtttcattaaaaaaagcggttaaatatgtttcctctccagaaaaaataataaaacattcttttctgccatttttaagctttgaagtaaaatcgtttaaaatcaaaaaagacaaatcaacaaaacaattaagtaaaactgaaaaattaagacctattgcctattcctcacatttggatagtcatatttatgcattttacgcagaatatcttactggacattatgaattattgatccaagaaaacaatttacacgagaacatccttgccttcagatctttaaataaaagcaatatagaatttgccaagagagcatttgatacaattactgaaatgggtgagtgtagcgctgttgcattagatctttctggtttttttgacaatttagatcatcaaattttgaaacaccagtggtgcaaagttattgggactgaagcgttgccgcaagaccattttgccatatacaaaagtataacaagatattctaaagttgataaaaatagagcgtatgagattttaggtatatcaaagaataaccccaagtataatagacgcaagatctgcacccctgttgattttagaaataagattagaaaaaatggtcttattatagttaataattcccaaaaaggtataccccaaggctcgccaattagtgctctactttcaaatatatatatgcttgactttgatattgaaatgagagattacgcgcaggaacgtggtggccattattatcgctattgtgatgatatgctattcattgtaccaactaagtataataaaactctagcaggtgatgtagcccagcggattaagcatcttaaggtagaactcaatactaagaaaactgagattcgagattttatatacaaagacagtaccttagtggcaaatatgcctttacagtatcttgggtttatttttgatgggagtaatatattattacgttcatcttctctcgcaagatattcggaacgaatgaaaagaggtgtccgcttagcaaaagctacaatggacagcaagaataggattagagaaaataaaggtgaagctttaaaagctttatttaagaaaaaattatatgccagatattcacatattggaagaaggaattttttgacttatggttatcgcgccgcgaagatcatgaattcgaaagctataaaaagacagttaaaaccattgcagaaaagattggaaaatgaaatactaaaataaatatttgctggcccgaatcatacagggccacaatacagttgaaaacaagctataataaacaacatctaatttttatataccgcaataactagcataaccccttggggcctctaaacgggtcttgaggggttttttgctgaaacctcaggcatttgagaagcacacggtcacactgcttccggtagtcaataaaccggtaaaccagcaatagacataagcggctatttaacgaccctgccctgaaccgacgaccgggtcgaatttgctttcgaatttctgccattcatccgcttattatcacttattcaggcgtagcaccaggcgtttaagggcaccaataactgccttaaaaaaattacgccccgccctgccactcatcgcaatactgttgtaattcatttaacattctgccgacatggaagccatcacagacggcatgatgaacctgaatcgccagcggcatcagcaccttgtcgccttgcgtataatatttgcccatagtgaaaacgggggcgaagaagttgtccatattggccacgtttaaatcaaaactggtgaaactcacccagggattggctgagacgaaaaacatattctcaataaaccctttagggaaataggccaggttttcaccgtaacacgccacatcttgcgaatatatgtgtagaaactgccggaaatcgtcgtggtattcactccagagcgatgaaaacgtttcagtttgctcatggaaaacggtgtaacaagggtgaacactatcccatatcaccagctcaccgtctttcatcgccatacggaactctggatgagcattcatcaggcgggcaagaatgtgaataaaggccggataaaacttgtgcttatttttctttacggtctttaaaaaggccgtaatatccagctgaacggtctggttataggtacattgagcaactgactgaaatgcctcaaaatgttctttacgatgccattgggatatatcaacggtggtatatccagtgatttttttctccattttagcttccttagctcctgaaaatctcgataactcaaaaaatacgcccggtagtgatcttatttcattatggtgaaagttggaacctcttacgtgccgatcaacgtctcattttcgccaaaagttggcccagggcttcccggtatcaacagggacaccaggatttatttattctgcgaagtgatcttccgtcacaggtatttattcggcgcaaagtgcgtcgggtgatgctgccaacttactgatttagtgtatgatggtgtttttgaggtgctccagtggcttctgtttctatcagctgtccctcctgttcagctactgacggggtggtgcgtaacggcaaaagcaccgccggacatcagcgctagcggagtgtatactggcttactatgttggcactgatgagggtgtcagtgaagtgcttcatgtggcaggagaaaaaaggctgcaccggtgcgtcagcagaatatgtgatacaggatatattccgcttcctcgctcactgactcgctacgctcggtcgttcgactgcggcgagcggaaatggcttacgaacggggcggagatttcctggaagatgccaggaagatacttaacagggaagtgagagggccgcggcaaagccgtttttccataggctccgcccccctgacaagcatcacgaaatctgacgctcaaatcagtggtggcgaaacccgacaggactataaagataccaggcgtttccccctggcggctccctcgtgcgctctcctgttcctgcctttcggtttaccggtgtcattccgctgttatggccgcgtttgtctcattccacgcctgacactcagttccgggtaggcagttcgctccaagctggactgtatgcacgaaccccccgttcagtccgaccgctgcgccttatccggtaactatcgtcttgagtccaacccggaaagacatgcaaaagcaccactggcagcagccactggtaattgatttagaggagttagtcttgaagtcatgcgccggttaaggctaaactgaaaggacaagttttggtgactgcgctcctccaagccagttacctcggttcaaagagttggtagctcagagaaccttcgaaaaaccgccctgcaaggcggttttttcgttttcagagcaagagattacgcgcagaccaaaacgatctcaagaagatcatcttattaatcagataaaatatttctagatttcagtgcaatttatctcttcaaatgtagcacctgaagtcagccccatacgatataagttgtaattctcatgttagtcatgccccgcgcccaccggaaggagctgactgggttgaaggctctcaagggcatcggtcgagatcccggtgcctaatgagtgagctaacttacattaattgcgttgcgca

SEQ ID NO: 896 - DNA, 4123 bp, Synthetic construct
  source 1..4123: mol_type = other DNA
acacgatataaaaccatctcattgcttgctgggttaactgagttgctgaatttttttctagaatttcgcaaaatttaataggtaaaccttgtttttttaaatttacgatgatataaaaataatgccctaaacaaaggtttaggggtattgtacaggttgtcaagcctcccacaggtcttggttgcagcaaggaaaccaatcactgtgacgacggtaagcaacacttggatgatattcataattgactccacgctactgattacattatacagcatatctaacatttgcggcgaggttcacaatttgtatttaggtactgattgtggatgagaaggttggagaaagaccacttggttaagccggaggatgtgtcctagaattgtcgctattctgtcatcctccggttttgctaatttcattcagggaatataatgaataatgatgattacccatggttcagaaaacgtggttatttgcatttcgatgaacctgtttcattaaaaaaagcggttaaatatgtttcctctccagaaaaaataataaaacattcttttctgccatttttaagctttgaagtaaaatcgtttaaaatcaaaaaagacaaatcaacaaaacaattaagtaaaactgaaaaattaagacctattgcctattcctcacatttggatagtcatatttatgcattttacgcagaatatcttactggacattatgaattattgatccaagaaaacaatttacacgagaacatccttgccttcagatctttaaataaaagcaatatagaatttgccaagagagcatttgatacaattactgaaatgggtgagtgtagcgctgttgcattagatctttctggtttttttgacaatttagatcatcaaattttgaaacaccagtggtgcaaagttattgggactgaagcgttgccgcaagaccattttgccatatacaaaagtataacaagatattctaaagttgataaaaatagagcgtatgagattttaggtatatcaaagaataaccccaagtataatagacgcaagatctgcacccctgttgattttagaaataagattagaaaaaatggtcttattatagttaataattcccaaaaaggtataccccaaggctcgccaattagtgctctactttcaaatatatatatgcttgactttgatattgaaatgagagattacgcgcaggaacgtggtggccattattatcgctattgtgatgatatgctattcattgtaccaactaagtataataaaactctagcaggtgatgtagcccagcggattaagcatcttaaggtagaactcaatactaagaaaactgagattcgagattttatatacaaagacagtaccttagtggcaaatatgcctttacagtatcttgggtttatttttgatgggagtaatatattattacgttcatcttctctcgcaagatattcggaacgaatgaaaagaggtgtccgcttagcaaaagctacaatggacagcaagaataggattagagaaaataaaggtgaagctttaaaagctttatttaagaaaaaattatatgccagatattcacatattggaagaaggaattttttgacttatggttatcgcgccgcgaagatcatgaattcgaaagctataaaaagacagttaaaaccattgcagaaaagattggaaaatgaaatactaaaataaatatttgctggcccgaatcatacagggccacaatacagttgaaaacaagctataataaacaacatctaatttttatataccgcaataactagcataaccccttggggcctctaaacgggtcttgaggggttttttgctgaaacctcaggcatttgagaagcacacggtcacactgcttccggtagtcaataaaccggtaaaccagcaatagacataagcggctatttaacgaccctgccctgaaccgacgaccgggtcgaatttgctttcgaatttctgccattcatccgcttattatcacttattcaggcgtagcaccaggcgtttaagggcaccaataactgccttaaaaaaattacgccccgccctgccactcatcgcaatactgttgtaattcatttaacattctgccgacatggaagccatcacagacggcatgatgaacctgaatcgccagcggcatcagcaccttgtcgccttgcgtataatatttgcccatagtgaaaacgggggcgaagaagttgtccatattggccacgtttaaatcaaaactggtgaaactcacccagggattggctgagacgaaaaacatattctcaataaaccctttagggaaataggccaggttttcaccgtaacacgccacatcttgcgaatatatgtgtagaaactgccggaaatcgtcgtggtattcactccagagcgatgaaaacgtttcagtttgctcatggaaaacggtgtaacaagggtgaacactatcccatatcaccagctcaccgtctttcatcgccatacggaactctggatgagcattcatcaggcgggcaagaatgtgaataaaggccggataaaacttgtgcttatttttctttacggtctttaaaaaggccgtaatatccagctgaacggtctggttataggtacattgagcaactgactgaaatgcctcaaaatgttctttacgatgccattgggatatatcaacggtggtatatccagtgatttttttctccattttagcttccttagctcctgaaaatctcgataactcaaaaaatacgcccggtagtgatcttatttcattatggtgaaagttggaacctcttacgtgccgatcaacgtctcattttcgccaaaagttggcccagggcttcccggtatcaacagggacaccaggatttatttattctgcgaagtgatcttccgtcacaggtatttattcggcgcaaagtgcgtcgggtgatgctgccaacttactgatttagtgtatgatggtgtttttgaggtgctccagtggcttctgtttctatcagctgtccctcctgttcagctactgacggggtggtgcgtaacggcaaaagcaccgccggacatcagcgctagcggagtgtatactggcttactatgttggcactgatgagggtgtcagtgaagtgcttcatgtggcaggagaaaaaaggctgcaccggtgcgtcagcagaatatgtgatacaggatatattccgcttcctcgctcactgactcgctacgctcggtcgttcgactgcggcgagcggaaatggcttacgaacggggcggagatttcctggaagatgccaggaagatacttaacagggaagtgagagggccgcggcaaagccgtttttccataggctccgcccccctgacaagcatcacgaaatctgacgctcaaatcagtggtggcgaaacccgacaggactataaagataccaggcgtttccccctggcggctccctcgtgcgctctcctgttcctgcctttcggtttaccggtgtcattccgctgttatggccgcgtttgtctcattccacgcctgacactcagttccgggtaggcagttcgctccaagctggactgtatgcacgaaccccccgttcagtccgaccgctgcgccttatccggtaactatcgtcttgagtccaacccggaaagacatgcaaaagcaccactggcagcagccactggtaattgatttagaggagttagtcttgaagtcatgcgccggttaaggctaaactgaaaggacaagttttggtgactgcgctcctccaagccagttacctcggttcaaagagttggtagctcagagaaccttcgaaaaaccgccctgcaaggcggttttttcgttttcagagcaagagattacgcgcagaccaaaacgatctcaagaagatcatcttattaatcagataaaatatttctagatttcagtgcaatttatctcttcaaatgtagcacctgaagtcagccccatacgatataagttgtaattctcatgttagtcatgccccgcgcccaccggaaggagctgactgggttgaaggctctcaagggcatcggtcgagatcccggtgcctaatgagtgagctaacttacattaattgcgttgcgca

SEQ ID NO: 897 - DNA, 4115 bp, Synthetic construct
  source 1..4115: mol_type = other DNA
acacgatataaaaccatctcattgcttgctgggttaactgagttgctgaatttttttctagaatttcgcaaaatttaataggtaaaccttgtttttttaaatttacgatgatataaaaataatgccctaaacaaaggtttaggggtattgtacaggttgtcaagcctcccacaggtcttggtgaaaccaatcactgtgacgacggtaagcaacacttggatgattattcataattgactccacgctactgattacattatacagcatatctaacatttgcggcgaggttcacaatttgtatttaggtactgattgtggatgagaaggttggagaaagaccacttggttaagccggaggatgtgtcctagaattgtcgctattctgtcatcctccggttttgctaatttcattcagggaatataatgaataatgatgattacccatggttcagaaaacgtggttatttgcatttcgatgaacctgtttcattaaaaaaagcggttaaatatgtttcctctccagaaaaaataataaaacattcttttctgccatttttaagctttgaagtaaaatcgtttaaaatcaaaaaagacaaatcaacaaaacaattaagtaaaactgaaaaattaagacctattgcctattcctcacatttggatagtcatatttatgcattttacgcagaatatcttactggacattatgaattattgatccaagaaaacaatttacacgagaacatccttgccttcagatctttaaataaaagcaatatagaatttgccaagagagcatttgatacaattactgaaatgggtgagtgtagcgctgttgcattagatctttctggtttttttgacaatttagatcatcaaattttgaaacaccagtggtgcaaagttattgggactgaagcgttgccgcaagaccattttgccatatacaaaagtataacaagatattctaaagttgataaaaatagagcgtatgagattttaggtatatcaaagaataaccccaagtataatagacgcaagatctgcacccctgttgattttagaaataagattagaaaaaatggtcttattatagttaataattcccaaaaaggtataccccaaggctcgccaattagtgctctactttcaaatatatatatgcttgactttgatattgaaatgagagattacgcgcaggaacgtggtggccattattatcgctattgtgatgatatgctattcattgtaccaactaagtataataaaactctagcaggtgatgtagcccagcggattaagcatcttaaggtagaactcaatactaagaaaactgagattcgagattttatatacaaagacagtaccttagtggcaaatatgcctttacagtatcttgggtttatttttgatgggagtaatatattattacgttcatcttctctcgcaagatattcggaacgaatgaaaagaggtgtccgcttagcaaaagctacaatggacagcaagaataggattagagaaaataaaggtgaagctttaaaagctttatttaagaaaaaattatatgccagatattcacatattggaagaaggaattttttgacttatggttatcgcgccgcgaagatcatgaattcgaaagctataaaaagacagttaaaaccattgcagaaaagattggaaaatgaaatactaaaataaatatttgctggcccgaatcatacagggccacaatacagttgaaaacaagctataataaacaacatctaatttttatataccgcaataactagcataaccccttggggcctctaaacgggtcttgaggggttttttgctgaaacctcaggcatttgagaagcacacggtcacactgcttccggtagtcaataaaccggtaaaccagcaatagacataagcggctatttaacgaccctgccctgaaccgacgaccgggtcgaatttgctttcgaatttctgccattcatccgcttattatcacttattcaggcgtagcaccaggcgtttaagggcaccaataactgccttaaaaaaattacgccccgccctgccactcatcgcaatactgttgtaattcatttaacattctgccgacatggaagccatcacagacggcatgatgaacctgaatcgccagcggcatcagcaccttgtcgccttgcgtataatatttgcccatagtgaaaacgggggcgaagaagttgtccatattggccacgtttaaatcaaaactggtgaaactcacccagggattggctgagacgaaaaacatattctcaataaaccctttagggaaataggccaggttttcaccgtaacacgccacatcttgcgaatatatgtgtagaaactgccggaaatcgtcgtggtattcactccagagcgatgaaaacgtttcagtttgctcatggaaaacggtgtaacaagggtgaacactatcccatatcaccagctcaccgtctttcatcgccatacggaactctggatgagcattcatcaggcgggcaagaatgtgaataaaggccggataaaacttgtgcttatttttctttacggtctttaaaaaggccgtaatatccagctgaacggtctggttataggtacattgagcaactgactgaaatgcctcaaaatgttctttacgatgccattgggatatatcaacggtggtatatccagtgatttttttctccattttagcttccttagctcctgaaaatctcgataactcaaaaaatacgcccggtagtgatcttatttcattatggtgaaagttggaacctcttacgtgccgatcaacgtctcattttcgccaaaagttggcccagggcttcccggtatcaacagggacaccaggatttatttattctgcgaagtgatcttccgtcacaggtatttattcggcgcaaagtgcgtcgggtgatgctgccaacttactgatttagtgtatgatggtgtttttgaggtgctccagtggcttctgtttctatcagctgtccctcctgttcagctactgacggggtggtgcgtaacggcaaaagcaccgccggacatcagcgctagcggagtgtatactggcttactatgttggcactgatgagggtgtcagtgaagtgcttcatgtggcaggagaaaaaaggctgcaccggtgcgtcagcagaatatgtgatacaggatatattccgcttcctcgctcactgactcgctacgctcggtcgttcgactgcggcgagcggaaatggcttacgaacggggcggagatttcctggaagatgccaggaagatacttaacagggaagtgagagggccgcggcaaagccgtttttccataggctccgcccccctgacaagcatcacgaaatctgacgctcaaatcagtggtggcgaaacccgacaggactataaagataccaggcgtttccccctggcggctccctcgtgcgctctcctgttcctgcctttcggtttaccggtgtcattccgctgttatggccgcgtttgtctcattccacgcctgacactcagttccgggtaggcagttcgctccaagctggactgtatgcacgaaccccccgttcagtccgaccgctgcgccttatccggtaactatcgtcttgagtccaacccggaaagacatgcaaaagcaccactggcagcagccactggtaattgatttagaggagttagtcttgaagtcatgcgccggttaaggctaaactgaaaggacaagttttggtgactgcgctcctccaagccagttacctcggttcaaagagttggtagctcagagaaccttcgaaaaaccgccctgcaaggcggttttttcgttttcagagcaagagattacgcgcagaccaaaacgatctcaagaagatcatcttattaatcagataaaatatttctagatttcagtgcaatttatctcttcaaatgtagcacctgaagtcagccccatacgatataagttgtaattctcatgttagtcatgccccgcgcccaccggaaggagctgactgggttgaaggctctcaagggcatcggtcgagatcccggtgcctaatgagtgagctaacttacattaattgcgttgcgca

SEQ ID NO: 898 - DNA, 4116 bp, Synthetic construct
  source 1..4116: mol_type = other DNA
acacgatataaaaccatctcattgcttgctgggttaactgagttgctgaatttttttctagaatttcgcaaaatttaataggtaaaccttgtttttttaaatttacgatgatataaaaataatgccctaaacaaaggtttaggggtattgtacaggttgtcaagcctcccacaggtcttggtgaaaccaatcactgtgacgacggtaagcaacacttggatgattaattcataattgactccacgctactgattacattatacagcatatctaacatttgcggcgaggttcacaatttgtatttaggtactgattgtggatgagaaggttggagaaagaccacttggttaagccggaggatgtgtcctagaattgtcgctattctgtcatcctccggttttgctaatttcattcagggaatataatgaataatgatgattacccatggttcagaaaacgtggttatttgcatttcgatgaacctgtttcattaaaaaaagcggttaaatatgtttcctctccagaaaaaataataaaacattcttttctgccatttttaagctttgaagtaaaatcgtttaaaatcaaaaaagacaaatcaacaaaacaattaagtaaaactgaaaaattaagacctattgcctattcctcacatttggatagtcatatttatgcattttacgcagaatatcttactggacattatgaattattgatccaagaaaacaatttacacgagaacatccttgccttcagatctttaaataaaagcaatatagaatttgccaagagagcatttgatacaattactgaaatgggtgagtgtagcgctgttgcattagatctttctggtttttttgacaatttagatcatcaaattttgaaacaccagtggtgcaaagttattgggactgaagcgttgccgcaagaccattttgccatatacaaaagtataacaagatattctaaagttgataaaaatagagcgtatgagattttaggtatatcaaagaataaccccaagtataatagacgcaagatctgcacccctgttgattttagaaataagattagaaaaaatggtcttattatagttaataattcccaaaaaggtataccccaaggctcgccaattagtgctctactttcaaatatatatatgcttgactttgatattgaaatgagagattacgcgcaggaacgtggtggccattattatcgctattgtgatgatatgctattcattgtaccaactaagtataataaaactctagcaggtgatgtagcccagcggattaagcatcttaaggtagaactcaatactaagaaaactgagattcgagattttatatacaaagacagtaccttagtggcaaatatgcctttacagtatcttgggtttatttttgatgggagtaatatattattacgttcatcttctctcgcaagatattcggaacgaatgaaaagaggtgtccgcttagcaaaagctacaatggacagcaagaataggattagagaaaataaaggtgaagctttaaaagctttatttaagaaaaaattatatgccagatattcacatattggaagaaggaattttttgacttatggttatcgcgccgcgaagatcatgaattcgaaagctataaaaagacagttaaaaccattgcagaaaagattggaaaatgaaatactaaaataaatatttgctggcccgaatcatacagggccacaatacagttgaaaacaagctataataaacaacatctaatttttatataccgcaataactagcataaccccttggggcctctaaacgggtcttgaggggttttttgctgaaacctcaggcatttgagaagcacacggtcacactgcttccggtagtcaataaaccggtaaaccagcaatagacataagcggctatttaacgaccctgccctgaaccgacgaccgggtcgaatttgctttcgaatttctgccattcatccgcttattatcacttattcaggcgtagcaccaggcgtttaagggcaccaataactgccttaaaaaaattacgccccgccctgccactcatcgcaatactgttgtaattcatttaacattctgccgacatggaagccatcacagacggcatgatgaacctgaatcgccagcggcatcagcaccttgtcgccttgcgtataatatttgcccatagtgaaaacgggggcgaagaagttgtccatattggccacgtttaaatcaaaactggtgaaactcacccagggattggctgagacgaaaaacatattctcaataaaccctttagggaaataggccaggttttcaccgtaacacgccacatcttgcgaatatatgtgtagaaactgccggaaatcgtcgtggtattcactccagagcgatgaaaacgtttcagtttgctcatggaaaacggtgtaacaagggtgaacactatcccatatcaccagctcaccgtctttcatcgccatacggaactctggatgagcattcatcaggcgggcaagaatgtgaataaaggccggataaaacttgtgcttatttttctttacggtctttaaaaaggccgtaatatccagctgaacggtctggttataggtacattgagcaactgactgaaatgcctcaaaatgttctttacgatgccattgggatatatcaacggtggtatatccagtgatttttttctccattttagcttccttagctcctgaaaatctcgataactcaaaaaatacgcccggtagtgatcttatttcattatggtgaaagttggaacctcttacgtgccgatcaacgtctcattttcgccaaaagttggcccagggcttcccggtatcaacagggacaccaggatttatttattctgcgaagtgatcttccgtcacaggtatttattcggcgcaaagtgcgtcgggtgatgctgccaacttactgatttagtgtatgatggtgtttttgaggtgctccagtggcttctgtttctatcagctgtccctcctgttcagctactgacggggtggtgcgtaacggcaaaagcaccgccggacatcagcgctagcggagtgtatactggcttactatgttggcactgatgagggtgtcagtgaagtgcttcatgtggcaggagaaaaaaggctgcaccggtgcgtcagcagaatatgtgatacaggatatattccgcttcctcgctcactgactcgctacgctcggtcgttcgactgcggcgagcggaaatggcttacgaacggggcggagatttcctggaagatgccaggaagatacttaacagggaagtgagagggccgcggcaaagccgtttttccataggctccgcccccctgacaagcatcacgaaatctgacgctcaaatcagtggtggcgaaacccgacaggactataaagataccaggcgtttccccctggcggctccctcgtgcgctctcctgttcctgcctttcggtttaccggtgtcattccgctgttatggccgcgtttgtctcattccacgcctgacactcagttccgggtaggcagttcgctccaagctggactgtatgcacgaaccccccgttcagtccgaccgctgcgccttatccggtaactatcgtcttgagtccaacccggaaagacatgcaaaagcaccactggcagcagccactggtaattgatttagaggagttagtcttgaagtcatgcgccggttaaggctaaactgaaaggacaagttttggtgactgcgctcctccaagccagttacctcggttcaaagagttggtagctcagagaaccttcgaaaaaccgccctgcaaggcggttttttcgttttcagagcaagagattacgcgcagaccaaaacgatctcaagaagatcatcttattaatcagataaaatatttctagatttcagtgcaatttatctcttcaaatgtagcacctgaagtcagccccatacgatataagttgtaattctcatgttagtcatgccccgcgcccaccggaaggagctgactgggttgaaggctctcaagggcatcggtcgagatcccggtgcctaatgagtgagctaacttacattaattgcgttgcgca

SEQ ID NO: 899 - DNA, 4117 bp, Synthetic construct
  source 1..4117: mol_type = other DNA
acacgatataaaaccatctcattgcttgctgggttaactgagttgctgaatttttttctagaatttcgcaaaatttaataggtaaaccttgtttttttaaatttacgatgatataaaaataatgccctaaacaaaggtttaggggtattgtacaggttgtcaagcctcccacaggtcttggtgaaaccaatcactgtgacgacggtaagcaacacttggatgattaaattcataattgactccacgctactgattacattatacagcatatctaacatttgcggcgaggttcacaatttgtatttaggtactgattgtggatgagaaggttggagaaagaccacttggttaagccggaggatgtgtcctagaattgtcgctattctgtcatcctccggttttgctaatttcattcagggaatataatgaataatgatgattacccatggttcagaaaacgtggttatttgcatttcgatgaacctgtttcattaaaaaaagcggttaaatatgtttcctctccagaaaaaataataaaacattcttttctgccatttttaagctttgaagtaaaatcgtttaaaatcaaaaaagacaaatcaacaaaacaattaagtaaaactgaaaaattaagacctattgcctattcctcacatttggatagtcatatttatgcattttacgcagaatatcttactggacattatgaattattgatccaagaaaacaatttacacgagaacatccttgccttcagatctttaaataaaagcaatatagaatttgccaagagagcatttgatacaattactgaaatgggtgagtgtagcgctgttgcattagatctttctggtttttttgacaatttagatcatcaaattttgaaacaccagtggtgcaaagttattgggactgaagcgttgccgcaagaccattttgccatatacaaaagtataacaagatattctaaagttgataaaaatagagcgtatgagattttaggtatatcaaagaataaccccaagtataatagacgcaagatctgcacccctgttgattttagaaataagattagaaaaaatggtcttattatagttaataattcccaaaaaggtataccccaaggctcgccaattagtgctctactttcaaatatatatatgcttgactttgatattgaaatgagagattacgcgcaggaacgtggtggccattattatcgctattgtgatgatatgctattcattgtaccaactaagtataataaaactctagcaggtgatgtagcccagcggattaagcatcttaaggtagaactcaatactaagaaaactgagattcgagattttatatacaaagacagtaccttagtggcaaatatgcctttacagtatcttgggtttatttttgatgggagtaatatattattacgttcatcttctctcgcaagatattcggaacgaatgaaaagaggtgtccgcttagcaaaagctacaatggacagcaagaataggattagagaaaataaaggtgaagctttaaaagctttatttaagaaaaaattatatgccagatattcacatattggaagaaggaattttttgacttatggttatcgcgccgcgaagatcatgaattcgaaagctataaaaagacagttaaaaccattgcagaaaagattggaaaatgaaatactaaaataaatatttgctggcccgaatcatacagggccacaatacagttgaaaacaagctataataaacaacatctaatttttatataccgcaataactagcataaccccttggggcctctaaacgggtcttgaggggttttttgctgaaacctcaggcatttgagaagcacacggtcacactgcttccggtagtcaataaaccggtaaaccagcaatagacataagcggctatttaacgaccctgccctgaaccgacgaccgggtcgaatttgctttcgaatttctgccattcatccgcttattatcacttattcaggcgtagcaccaggcgtttaagggcaccaataactgccttaaaaaaattacgccccgccctgccactcatcgcaatactgttgtaattcatttaacattctgccgacatggaagccatcacagacggcatgatgaacctgaatcgccagcggcatcagcaccttgtcgccttgcgtataatatttgcccatagtgaaaacgggggcgaagaagttgtccatattggccacgtttaaatcaaaactggtgaaactcacccagggattggctgagacgaaaaacatattctcaataaaccctttagggaaataggccaggttttcaccgtaacacgccacatcttgcgaatatatgtgtagaaactgccggaaatcgtcgtggtattcactccagagcgatgaaaacgtttcagtttgctcatggaaaacggtgtaacaagggtgaacactatcccatatcaccagctcaccgtctttcatcgccatacggaactctggatgagcattcatcaggcgggcaagaatgtgaataaaggccggataaaacttgtgcttatttttctttacggtctttaaaaaggccgtaatatccagctgaacggtctggttataggtacattgagcaactgactgaaatgcctcaaaatgttctttacgatgccattgggatatatcaacggtggtatatccagtgatttttttctccattttagcttccttagctcctgaaaatctcgataactcaaaaaatacgcccggtagtgatcttatttcattatggtgaaagttggaacctcttacgtgccgatcaacgtctcattttcgccaaaagttggcccagggcttcccggtatcaacagggacaccaggatttatttattctgcgaagtgatcttccgtcacaggtatttattcggcgcaaagtgcgtcgggtgatgctgccaacttactgatttagtgtatgatggtgtttttgaggtgctccagtggcttctgtttctatcagctgtccctcctgttcagctactgacggggtggtgcgtaacggcaaaagcaccgccggacatcagcgctagcggagtgtatactggcttactatgttggcactgatgagggtgtcagtgaagtgcttcatgtggcaggagaaaaaaggctgcaccggtgcgtcagcagaatatgtgatacaggatatattccgcttcctcgctcactgactcgctacgctcggtcgttcgactgcggcgagcggaaatggcttacgaacggggcggagatttcctggaagatgccaggaagatacttaacagggaagtgagagggccgcggcaaagccgtttttccataggctccgcccccctgacaagcatcacgaaatctgacgctcaaatcagtggtggcgaaacccgacaggactataaagataccaggcgtttccccctggcggctccctcgtgcgctctcctgttcctgcctttcggtttaccggtgtcattccgctgttatggccgcgtttgtctcattccacgcctgacactcagttccgggtaggcagttcgctccaagctggactgtatgcacgaaccccccgttcagtccgaccgctgcgccttatccggtaactatcgtcttgagtccaacccggaaagacatgcaaaagcaccactggcagcagccactggtaattgatttagaggagttagtcttgaagtcatgcgccggttaaggctaaactgaaaggacaagttttggtgactgcgctcctccaagccagttacctcggttcaaagagttggtagctcagagaaccttcgaaaaaccgccctgcaaggcggttttttcgttttcagagcaagagattacgcgcagaccaaaacgatctcaagaagatcatcttattaatcagataaaatatttctagatttcagtgcaatttatctcttcaaatgtagcacctgaagtcagccccatacgatataagttgtaattctcatgttagtcatgccccgcgcccaccggaaggagctgactgggttgaaggctctcaagggcatcggtcgagatcccggtgcctaatgagtgagctaacttacattaattgcgttgcgca

SEQ ID NO: 900 - DNA, 4118 bp, Synthetic construct
  source 1..4118: mol_type = other DNA
acacgatataaaaccatctcattgcttgctgggttaactgagttgctgaatttttttctagaatttcgcaaaatttaataggtaaaccttgtttttttaaatttacgatgatataaaaataatgccctaaacaaaggtttaggggtattgtacaggttgtcaagcctcccacaggtcttggtgaaaccaatcactgtgacgacggtaagcaacacttggatgattaatattcataattgactccacgctactgattacattatacagcatatctaacatttgcggcgaggttcacaatttgtatttaggtactgattgtggatgagaaggttggagaaagaccacttggttaagccggaggatgtgtcctagaattgtcgctattctgtcatcctccggttttgctaatttcattcagggaatataatgaataatgatgattacccatggttcagaaaacgtggttatttgcatttcgatgaacctgtttcattaaaaaaagcggttaaatatgtttcctctccagaaaaaataataaaacattcttttctgccatttttaagctttgaagtaaaatcgtttaaaatcaaaaaagacaaatcaacaaaacaattaagtaaaactgaaaaattaagacctattgcctattcctcacatttggatagtcatatttatgcattttacgcagaatatcttactggacattatgaattattgatccaagaaaacaatttacacgagaacatccttgccttcagatctttaaataaaagcaatatagaatttgccaagagagcatttgatacaattactgaaatgggtgagtgtagcgctgttgcattagatctttctggtttttttgacaatttagatcatcaaattttgaaacaccagtggtgcaaagttattgggactgaagcgttgccgcaagaccattttgccatatacaaaagtataacaagatattctaaagttgataaaaatagagcgtatgagattttaggtatatcaaagaataaccccaagtataatagacgcaagatctgcacccctgttgattttagaaataagattagaaaaaatggtcttattatagttaataattcccaaaaaggtataccccaaggctcgccaattagtgctctactttcaaatatatatatgcttgactttgatattgaaatgagagattacgcgcaggaacgtggtggccattattatcgctattgtgatgatatgctattcattgtaccaactaagtataataaaactctagcaggtgatgtagcccagcggattaagcatcttaaggtagaactcaatactaagaaaactgagattcgagattttatatacaaagacagtaccttagtggcaaatatgcctttacagtatcttgggtttatttttgatgggagtaatatattattacgttcatcttctctcgcaagatattcggaacgaatgaaaagaggtgtccgcttagcaaaagctacaatggacagcaagaataggattagagaaaataaaggtgaagctttaaaagctttatttaagaaaaaattatatgccagatattcacatattggaagaaggaattttttgacttatggttatcgcgccgcgaagatcatgaattcgaaagctataaaaagacagttaaaaccattgcagaaaagattggaaaatgaaatactaaaataaatatttgctggcccgaatcatacagggccacaatacagttgaaaacaagctataataaacaacatctaatttttatataccgcaataactagcataaccccttggggcctctaaacgggtcttgaggggttttttgctgaaacctcaggcatttgagaagcacacggtcacactgcttccggtagtcaataaaccggtaaaccagcaatagacataagcggctatttaacgaccctgccctgaaccgacgaccgggtcgaatttgctttcgaatttctgccattcatccgcttattatcacttattcaggcgtagcaccaggcgtttaagggcaccaataactgccttaaaaaaattacgccccgccctgccactcatcgcaatactgttgtaattcatttaacattctgccgacatggaagccatcacagacggcatgatgaacctgaatcgccagcggcatcagcaccttgtcgccttgcgtataatatttgcccatagtgaaaacgggggcgaagaagttgtccatattggccacgtttaaatcaaaactggtgaaactcacccagggattggctgagacgaaaaacatattctcaataaaccctttagggaaataggccaggttttcaccgtaacacgccacatcttgcgaatatatgtgtagaaactgccggaaatcgtcgtggtattcactccagagcgatgaaaacgtttcagtttgctcatggaaaacggtgtaacaagggtgaacactatcccatatcaccagctcaccgtctttcatcgccatacggaactctggatgagcattcatcaggcgggcaagaatgtgaataaaggccggataaaacttgtgcttatttttctttacggtctttaaaaaggccgtaatatccagctgaacggtctggttataggtacattgagcaactgactgaaatgcctcaaaatgttctttacgatgccattgggatatatcaacggtggtatatccagtgatttttttctccattttagcttccttagctcctgaaaatctcgataactcaaaaaatacgcccggtagtgatcttatttcattatggtgaaagttggaacctcttacgtgccgatcaacgtctcattttcgccaaaagttggcccagggcttcccggtatcaacagggacaccaggatttatttattctgcgaagtgatcttccgtcacaggtatttattcggcgcaaagtgcgtcgggtgatgctgccaacttactgatttagtgtatgatggtgtttttgaggtgctccagtggcttctgtttctatcagctgtccctcctgttcagctactgacggggtggtgcgtaacggcaaaagcaccgccggacatcagcgctagcggagtgtatactggcttactatgttggcactgatgagggtgtcagtgaagtgcttcatgtggcaggagaaaaaaggctgcaccggtgcgtcagcagaatatgtgatacaggatatattccgcttcctcgctcactgactcgctacgctcggtcgttcgactgcggcgagcggaaatggcttacgaacggggcggagatttcctggaagatgccaggaagatacttaacagggaagtgagagggccgcggcaaagccgtttttccataggctccgcccccctgacaagcatcacgaaatctgacgctcaaatcagtggtggcgaaacccgacaggactataaagataccaggcgtttccccctggcggctccctcgtgcgctctcctgttcctgcctttcggtttaccggtgtcattccgctgttatggccgcgtttgtctcattccacgcctgacactcagttccgggtaggcagttcgctccaagctggactgtatgcacgaaccccccgttcagtccgaccgctgcgccttatccggtaactatcgtcttgagtccaacccggaaagacatgcaaaagcaccactggcagcagccactggtaattgatttagaggagttagtcttgaagtcatgcgccggttaaggctaaactgaaaggacaagttttggtgactgcgctcctccaagccagttacctcggttcaaagagttggtagctcagagaaccttcgaaaaaccgccctgcaaggcggttttttcgttttcagagcaagagattacgcgcagaccaaaacgatctcaagaagatcatcttattaatcagataaaatatttctagatttcagtgcaatttatctcttcaaatgtagcacctgaagtcagccccatacgatataagttgtaattctcatgttagtcatgccccgcgcccaccggaaggagctgactgggttgaaggctctcaagggcatcggtcgagatcccggtgcctaatgagtgagctaacttacattaattgcgttgcgca

SEQ ID NO: 901 - DNA, 4119 bp, Synthetic construct
  source 1..4119: mol_type = other DNA
acacgatataaaaccatctcattgcttgctgggttaactgagttgctgaatttttttctagaatttcgcaaaatttaataggtaaaccttgtttttttaaatttacgatgatataaaaataatgccctaaacaaaggtttaggggtattgtacaggttgtcaagcctcccacaggtcttggtgaaaccaatcactgtgacgacggtaagcaacacttggatgattaataattcataattgactccacgctactgattacattatacagcatatctaacatttgcggcgaggttcacaatttgtatttaggtactgattgtggatgagaaggttggagaaagaccacttggttaagccggaggatgtgtcctagaattgtcgctattctgtcatcctccggttttgctaatttcattcagggaatataatgaataatgatgattacccatggttcagaaaacgtggttatttgcatttcgatgaacctgtttcattaaaaaaagcggttaaatatgtttcctctccagaaaaaataataaaacattcttttctgccatttttaagctttgaagtaaaatcgtttaaaatcaaaaaagacaaatcaacaaaacaattaagtaaaactgaaaaattaagacctattgcctattcctcacatttggatagtcatatttatgcattttacgcagaatatcttactggacattatgaattattgatccaagaaaacaatttacacgagaacatccttgccttcagatctttaaataaaagcaatatagaatttgccaagagagcatttgatacaattactgaaatgggtgagtgtagcgctgttgcattagatctttctggtttttttgacaatttagatcatcaaattttgaaacaccagtggtgcaaagttattgggactgaagcgttgccgcaagaccattttgccatatacaaaagtataacaagatattctaaagttgataaaaatagagcgtatgagattttaggtatatcaaagaataaccccaagtataatagacgcaagatctgcacccctgttgattttagaaataagattagaaaaaatggtcttattatagttaataattcccaaaaaggtataccccaaggctcgccaattagtgctctactttcaaatatatatatgcttgactttgatattgaaatgagagattacgcgcaggaacgtggtggccattattatcgctattgtgatgatatgctattcattgtaccaactaagtataataaaactctagcaggtgatgtagcccagcggattaagcatcttaaggtagaactcaatactaagaaaactgagattcgagattttatatacaaagacagtaccttagtggcaaatatgcctttacagtatcttgggtttatttttgatgggagtaatatattattacgttcatcttctctcgcaagatattcggaacgaatgaaaagaggtgtccgcttagcaaaagctacaatggacagcaagaataggattagagaaaataaaggtgaagctttaaaagctttatttaagaaaaaattatatgccagatattcacatattggaagaaggaattttttgacttatggttatcgcgccgcgaagatcatgaattcgaaagctataaaaagacagttaaaaccattgcagaaaagattggaaaatgaaatactaaaataaatatttgctggcccgaatcatacagggccacaatacagttgaaaacaagctataataaacaacatctaatttttatataccgcaataactagcataaccccttggggcctctaaacgggtcttgaggggttttttgctgaaacctcaggcatttgagaagcacacggtcacactgcttccggtagtcaataaaccggtaaaccagcaatagacataagcggctatttaacgaccctgccctgaaccgacgaccgggtcgaatttgctttcgaatttctgccattcatccgcttattatcacttattcaggcgtagcaccaggcgtttaagggcaccaataactgccttaaaaaaattacgccccgccctgccactcatcgcaatactgttgtaattcatttaacattctgccgacatggaagccatcacagacggcatgatgaacctgaatcgccagcggcatcagcaccttgtcgccttgcgtataatatttgcccatagtgaaaacgggggcgaagaagttgtccatattggccacgtttaaatcaaaactggtgaaactcacccagggattggctgagacgaaaaacatattctcaataaaccctttagggaaataggccaggttttcaccgtaacacgccacatcttgcgaatatatgtgtagaaactgccggaaatcgtcgtggtattcactccagagcgatgaaaacgtttcagtttgctcatggaaaacggtgtaacaagggtgaacactatcccatatcaccagctcaccgtctttcatcgccatacggaactctggatgagcattcatcaggcgggcaagaatgtgaataaaggccggataaaacttgtgcttatttttctttacggtctttaaaaaggccgtaatatccagctgaacggtctggttataggtacattgagcaactgactgaaatgcctcaaaatgttctttacgatgccattgggatatatcaacggtggtatatccagtgatttttttctccattttagcttccttagctcctgaaaatctcgataactcaaaaaatacgcccggtagtgatcttatttcattatggtgaaagttggaacctcttacgtgccgatcaacgtctcattttcgccaaaagttggcccagggcttcccggtatcaacagggacaccaggatttatttattctgcgaagtgatcttccgtcacaggtatttattcggcgcaaagtgcgtcgggtgatgctgccaacttactgatttagtgtatgatggtgtttttgaggtgctccagtggcttctgtttctatcagctgtccctcctgttcagctactgacggggtggtgcgtaacggcaaaagcaccgccggacatcagcgctagcggagtgtatactggcttactatgttggcactgatgagggtgtcagtgaagtgcttcatgtggcaggagaaaaaaggctgcaccggtgcgtcagcagaatatgtgatacaggatatattccgcttcctcgctcactgactcgctacgctcggtcgttcgactgcggcgagcggaaatggcttacgaacggggcggagatttcctggaagatgccaggaagatacttaacagggaagtgagagggccgcggcaaagccgtttttccataggctccgcccccctgacaagcatcacgaaatctgacgctcaaatcagtggtggcgaaacccgacaggactataaagataccaggcgtttccccctggcggctccctcgtgcgctctcctgttcctgcctttcggtttaccggtgtcattccgctgttatggccgcgtttgtctcattccacgcctgacactcagttccgggtaggcagttcgctccaagctggactgtatgcacgaaccccccgttcagtccgaccgctgcgccttatccggtaactatcgtcttgagtccaacccggaaagacatgcaaaagcaccactggcagcagccactggtaattgatttagaggagttagtcttgaagtcatgcgccggttaaggctaaactgaaaggacaagttttggtgactgcgctcctccaagccagttacctcggttcaaagagttggtagctcagagaaccttcgaaaaaccgccctgcaaggcggttttttcgttttcagagcaagagattacgcgcagaccaaaacgatctcaagaagatcatcttattaatcagataaaatatttctagatttcagtgcaatttatctcttcaaatgtagcacctgaagtcagccccatacgatataagttgtaattctcatgttagtcatgccccgcgcccaccggaaggagctgactgggttgaaggctctcaagggcatcggtcgagatcccggtgcctaatgagtgagctaacttacattaattgcgttgcgca

SEQ ID NO: 902 - DNA, 4120 bp, Synthetic construct
  source 1..4120: mol_type = other DNA
acacgatataaaaccatctcattgcttgctgggttaactgagttgctgaatttttttctagaatttcgcaaaatttaataggtaaaccttgtttttttaaatttacgatgatataaaaataatgccctaaacaaaggtttaggggtattgtacaggttgtcaagcctcccacaggtcttggtgaaaccaatcactgtgacgacggtaagcaacacttggatgattaatatattcataattgactccacgctactgattacattatacagcatatctaacatttgcggcgaggttcacaatttgtatttaggtactgattgtggatgagaaggttggagaaagaccacttggttaagccggaggatgtgtcctagaattgtcgctattctgtcatcctccggttttgctaatttcattcagggaatataatgaataatgatgattacccatggttcagaaaacgtggttatttgcatttcgatgaacctgtttcattaaaaaaagcggttaaatatgtttcctctccagaaaaaataataaaacattcttttctgccatttttaagctttgaagtaaaatcgtttaaaatcaaaaaagacaaatcaacaaaacaattaagtaaaactgaaaaattaagacctattgcctattcctcacatttggatagtcatatttatgcattttacgcagaatatcttactggacattatgaattattgatccaagaaaacaatttacacgagaacatccttgccttcagatctttaaataaaagcaatatagaatttgccaagagagcatttgatacaattactgaaatgggtgagtgtagcgctgttgcattagatctttctggtttttttgacaatttagatcatcaaattttgaaacaccagtggtgcaaagttattgggactgaagcgttgccgcaagaccattttgccatatacaaaagtataacaagatattctaaagttgataaaaatagagcgtatgagattttaggtatatcaaagaataaccccaagtataatagacgcaagatctgcacccctgttgattttagaaataagattagaaaaaatggtcttattatagttaataattcccaaaaaggtataccccaaggctcgccaattagtgctctactttcaaatatatatatgcttgactttgatattgaaatgagagattacgcgcaggaacgtggtggccattattatcgctattgtgatgatatgctattcattgtaccaactaagtataataaaactctagcaggtgatgtagcccagcggattaagcatcttaaggtagaactcaatactaagaaaactgagattcgagattttatatacaaagacagtaccttagtggcaaatatgcctttacagtatcttgggtttatttttgatgggagtaatatattattacgttcatcttctctcgcaagatattcggaacgaatgaaaagaggtgtccgcttagcaaaagctacaatggacagcaagaataggattagagaaaataaaggtgaagctttaaaagctttatttaagaaaaaattatatgccagatattcacatattggaagaaggaattttttgacttatggttatcgcgccgcgaagatcatgaattcgaaagctataaaaagacagttaaaaccattgcagaaaagattggaaaatgaaatactaaaataaatatttgctggcccgaatcatacagggccacaatacagttgaaaacaagctataataaacaacatctaatttttatataccgcaataactagcataaccccttggggcctctaaacgggtcttgaggggttttttgctgaaacctcaggcatttgagaagcacacggtcacactgcttccggtagtcaataaaccggtaaaccagcaatagacataagcggctatttaacgaccctgccctgaaccgacgaccgggtcgaatttgctttcgaatttctgccattcatccgcttattatcacttattcaggcgtagcaccaggcgtttaagggcaccaataactgccttaaaaaaattacgccccgccctgccactcatcgcaatactgttgtaattcatttaacattctgccgacatggaagccatcacagacggcatgatgaacctgaatcgccagcggcatcagcaccttgtcgccttgcgtataatatttgcccatagtgaaaacgggggcgaagaagttgtccatattggccacgtttaaatcaaaactggtgaaactcacccagggattggctgagacgaaaaacatattctcaataaaccctttagggaaataggccaggttttcaccgtaacacgccacatcttgcgaatatatgtgtagaaactgccggaaatcgtcgtggtattcactccagagcgatgaaaacgtttcagtttgctcatggaaaacggtgtaacaagggtgaacactatcccatatcaccagctcaccgtctttcatcgccatacggaactctggatgagcattcatcaggcgggcaagaatgtgaataaaggccggataaaacttgtgcttatttttctttacggtctttaaaaaggccgtaatatccagctgaacggtctggttataggtacattgagcaactgactgaaatgcctcaaaatgttctttacgatgccattgggatatatcaacggtggtatatccagtgatttttttctccattttagcttccttagctcctgaaaatctcgataactcaaaaaatacgcccggtagtgatcttatttcattatggtgaaagttggaacctcttacgtgccgatcaacgtctcattttcgccaaaagttggcccagggcttcccggtatcaacagggacaccaggatttatttattctgcgaagtgatcttccgtcacaggtatttattcggcgcaaagtgcgtcgggtgatgctgccaacttactgatttagtgtatgatggtgtttttgaggtgctccagtggcttctgtttctatcagctgtccctcctgttcagctactgacggggtggtgcgtaacggcaaaagcaccgccggacatcagcgctagcggagtgtatactggcttactatgttggcactgatgagggtgtcagtgaagtgcttcatgtggcaggagaaaaaaggctgcaccggtgcgtcagcagaatatgtgatacaggatatattccgcttcctcgctcactgactcgctacgctcggtcgttcgactgcggcgagcggaaatggcttacgaacggggcggagatttcctggaagatgccaggaagatacttaacagggaagtgagagggccgcggcaaagccgtttttccataggctccgcccccctgacaagcatcacgaaatctgacgctcaaatcagtggtggcgaaacccgacaggactataaagataccaggcgtttccccctggcggctccctcgtgcgctctcctgttcctgcctttcggtttaccggtgtcattccgctgttatggccgcgtttgtctcattccacgcctgacactcagttccgggtaggcagttcgctccaagctggactgtatgcacgaaccccccgttcagtccgaccgctgcgccttatccggtaactatcgtcttgagtccaacccggaaagacatgcaaaagcaccactggcagcagccactggtaattgatttagaggagttagtcttgaagtcatgcgccggttaaggctaaactgaaaggacaagttttggtgactgcgctcctccaagccagttacctcggttcaaagagttggtagctcagagaaccttcgaaaaaccgccctgcaaggcggttttttcgttttcagagcaagagattacgcgcagaccaaaacgatctcaagaagatcatcttattaatcagataaaatatttctagatttcagtgcaatttatctcttcaaatgtagcacctgaagtcagccccatacgatataagttgtaattctcatgttagtcatgccccgcgcccaccggaaggagctgactgggttgaaggctctcaagggcatcggtcgagatcccggtgcctaatgagtgagctaacttacattaattgcgttgcgca

SEQ ID NO: 903 - DNA, 4121 bp, Synthetic construct
  source 1..4121: mol_type = other DNA
acacgatataaaaccatctcattgcttgctgggttaactgagttgctgaatttttttctagaatttcgcaaaatttaataggtaaaccttgtttttttaaatttacgatgatataaaaataatgccctaaacaaaggtttaggggtattgtacaggttgtcaagcctcccacaggtcttggtgaaaccaatcactgtgacgacggtaagcaacacttggatgattaagtatattcataattgactccacgctactgattacattatacagcatatctaacatttgcggcgaggttcacaatttgtatttaggtactgattgtggatgagaaggttggagaaagaccacttggttaagccggaggatgtgtcctagaattgtcgctattctgtcatcctccggttttgctaatttcattcagggaatataatgaataatgatgattacccatggttcagaaaacgtggttatttgcatttcgatgaacctgtttcattaaaaaaagcggttaaatatgtttcctctccagaaaaaataataaaacattcttttctgccatttttaagctttgaagtaaaatcgtttaaaatcaaaaaagacaaatcaacaaaacaattaagtaaaactgaaaaattaagacctattgcctattcctcacatttggatagtcatatttatgcattttacgcagaatatcttactggacattatgaattattgatccaagaaaacaatttacacgagaacatccttgccttcagatctttaaataaaagcaatatagaatttgccaagagagcatttgatacaattactgaaatgggtgagtgtagcgctgttgcattagatctttctggtttttttgacaatttagatcatcaaattttgaaacaccagtggtgcaaagttattgggactgaagcgttgccgcaagaccattttgccatatacaaaagtataacaagatattctaaagttgataaaaatagagcgtatgagattttaggtatatcaaagaataaccccaagtataatagacgcaagatctgcacccctgttgattttagaaataagattagaaaaaatggtcttattatagttaataattcccaaaaaggtataccccaaggctcgccaattagtgctctactttcaaatatatatatgcttgactttgatattgaaatgagagattacgcgcaggaacgtggtggccattattatcgctattgtgatgatatgctattcattgtaccaactaagtataataaaactctagcaggtgatgtagcccagcggattaagcatcttaaggtagaactcaatactaagaaaactgagattcgagattttatatacaaagacagtaccttagtggcaaatatgcctttacagtatcttgggtttatttttgatgggagtaatatattattacgttcatcttctctcgcaagatattcggaacgaatgaaaagaggtgtccgcttagcaaaagctacaatggacagcaagaataggattagagaaaataaaggtgaagctttaaaagctttatttaagaaaaaattatatgccagatattcacatattggaagaaggaattttttgacttatggttatcgcgccgcgaagatcatgaattcgaaagctataaaaagacagttaaaaccattgcagaaaagattggaaaatgaaatactaaaataaatatttgctggcccgaatcatacagggccacaatacagttgaaaacaagctataataaacaacatctaatttttatataccgcaataactagcataaccccttggggcctctaaacgggtcttgaggggttttttgctgaaacctcaggcatttgagaagcacacggtcacactgcttccggtagtcaataaaccggtaaaccagcaatagacataagcggctatttaacgaccctgccctgaaccgacgaccgggtcgaatttgctttcgaatttctgccattcatccgcttattatcacttattcaggcgtagcaccaggcgtttaagggcaccaataactgccttaaaaaaattacgccccgccctgccactcatcgcaatactgttgtaattcatttaacattctgccgacatggaagccatcacagacggcatgatgaacctgaatcgccagcggcatcagcaccttgtcgccttgcgtataatatttgcccatagtgaaaacgggggcgaagaagttgtccatattggccacgtttaaatcaaaactggtgaaactcacccagggattggctgagacgaaaaacatattctcaataaaccctttagggaaataggccaggttttcaccgtaacacgccacatcttgcgaatatatgtgtagaaactgccggaaatcgtcgtggtattcactccagagcgatgaaaacgtttcagtttgctcatggaaaacggtgtaacaagggtgaacactatcccatatcaccagctcaccgtctttcatcgccatacggaactctggatgagcattcatcaggcgggcaagaatgtgaataaaggccggataaaacttgtgcttatttttctttacggtctttaaaaaggccgtaatatccagctgaacggtctggttataggtacattgagcaactgactgaaatgcctcaaaatgttctttacgatgccattgggatatatcaacggtggtatatccagtgatttttttctccattttagcttccttagctcctgaaaatctcgataactcaaaaaatacgcccggtagtgatcttatttcattatggtgaaagttggaacctcttacgtgccgatcaacgtctcattttcgccaaaagttggcccagggcttcccggtatcaacagggacaccaggatttatttattctgcgaagtgatcttccgtcacaggtatttattcggcgcaaagtgcgtcgggtgatgctgccaacttactgatttagtgtatgatggtgtttttgaggtgctccagtggcttctgtttctatcagctgtccctcctgttcagctactgacggggtggtgcgtaacggcaaaagcaccgccggacatcagcgctagcggagtgtatactggcttactatgttggcactgatgagggtgtcagtgaagtgcttcatgtggcaggagaaaaaaggctgcaccggtgcgtcagcagaatatgtgatacaggatatattccgcttcctcgctcactgactcgctacgctcggtcgttcgactgcggcgagcggaaatggcttacgaacggggcggagatttcctggaagatgccaggaagatacttaacagggaagtgagagggccgcggcaaagccgtttttccataggctccgcccccctgacaagcatcacgaaatctgacgctcaaatcagtggtggcgaaacccgacaggactataaagataccaggcgtttccccctggcggctccctcgtgcgctctcctgttcctgcctttcggtttaccggtgtcattccgctgttatggccgcgtttgtctcattccacgcctgacactcagttccgggtaggcagttcgctccaagctggactgtatgcacgaaccccccgttcagtccgaccgctgcgccttatccggtaactatcgtcttgagtccaacccggaaagacatgcaaaagcaccactggcagcagccactggtaattgatttagaggagttagtcttgaagtcatgcgccggttaaggctaaactgaaaggacaagttttggtgactgcgctcctccaagccagttacctcggttcaaagagttggtagctcagagaaccttcgaaaaaccgccctgcaaggcggttttttcgttttcagagcaagagattacgcgcagaccaaaacgatctcaagaagatcatcttattaatcagataaaatatttctagatttcagtgcaatttatctcttcaaatgtagcacctgaagtcagccccatacgatataagttgtaattctcatgttagtcatgccccgcgcccaccggaaggagctgactgggttgaaggctctcaagggcatcggtcgagatcccggtgcctaatgagtgagctaacttacattaattgcgttgcgca

SEQ ID NO: 904 - DNA, 4122 bp, Synthetic construct
  source 1..4122: mol_type = other DNA
acacgatataaaaccatctcattgcttgctgggttaactgagttgctgaatttttttctagaatttcgcaaaatttaataggtaaaccttgtttttttaaatttacgatgatataaaaataatgccctaaacaaaggtttaggggtattgtacaggttgtcaagcctcccacaggtcttggtgaaaccaatcactgtgacgacggtaagcaacacttggatgattaaggtatattcataattgactccacgctactgattacattatacagcatatctaacatttgcggcgaggttcacaatttgtatttaggtactgattgtggatgagaaggttggagaaagaccacttggttaagccggaggatgtgtcctagaattgtcgctattctgtcatcctccggttttgctaatttcattcagggaatataatgaataatgatgattacccatggttcagaaaacgtggttatttgcatttcgatgaacctgtttcattaaaaaaagcggttaaatatgtttcctctccagaaaaaataataaaacattcttttctgccatttttaagctttgaagtaaaatcgtttaaaatcaaaaaagacaaatcaacaaaacaattaagtaaaactgaaaaattaagacctattgcctattcctcacatttggatagtcatatttatgcattttacgcagaatatcttactggacattatgaattattgatccaagaaaacaatttacacgagaacatccttgccttcagatctttaaataaaagcaatatagaatttgccaagagagcatttgatacaattactgaaatgggtgagtgtagcgctgttgcattagatctttctggtttttttgacaatttagatcatcaaattttgaaacaccagtggtgcaaagttattgggactgaagcgttgccgcaagaccattttgccatatacaaaagtataacaagatattctaaagttgataaaaatagagcgtatgagattttaggtatatcaaagaataaccccaagtataatagacgcaagatctgcacccctgttgattttagaaataagattagaaaaaatggtcttattatagttaataattcccaaaaaggtataccccaaggctcgccaattagtgctctactttcaaatatatatatgcttgactttgatattgaaatgagagattacgcgcaggaacgtggtggccattattatcgctattgtgatgatatgctattcattgtaccaactaagtataataaaactctagcaggtgatgtagcccagcggattaagcatcttaaggtagaactcaatactaagaaaactgagattcgagattttatatacaaagacagtaccttagtggcaaatatgcctttacagtatcttgggtttatttttgatgggagtaatatattattacgttcatcttctctcgcaagatattcggaacgaatgaaaagaggtgtccgcttagcaaaagctacaatggacagcaagaataggattagagaaaataaaggtgaagctttaaaagctttatttaagaaaaaattatatgccagatattcacatattggaagaaggaattttttgacttatggttatcgcgccgcgaagatcatgaattcgaaagctataaaaagacagttaaaaccattgcagaaaagattggaaaatgaaatactaaaataaatatttgctggcccgaatcatacagggccacaatacagttgaaaacaagctataataaacaacatctaatttttatataccgcaataactagcataaccccttggggcctctaaacgggtcttgaggggttttttgctgaaacctcaggcatttgagaagcacacggtcacactgcttccggtagtcaataaaccggtaaaccagcaatagacataagcggctatttaacgaccctgccctgaaccgacgaccgggtcgaatttgctttcgaatttctgccattcatccgcttattatcacttattcaggcgtagcaccaggcgtttaagggcaccaataactgccttaaaaaaattacgccccgccctgccactcatcgcaatactgttgtaattcatttaacattctgccgacatggaagccatcacagacggcatgatgaacctgaatcgccagcggcatcagcaccttgtcgccttgcgtataatatttgcccatagtgaaaacgggggcgaagaagttgtccatattggccacgtttaaatcaaaactggtgaaactcacccagggattggctgagacgaaaaacatattctcaataaaccctttagggaaataggccaggttttcaccgtaacacgccacatcttgcgaatatatgtgtagaaactgccggaaatcgtcgtggtattcactccagagcgatgaaaacgtttcagtttgctcatggaaaacggtgtaacaagggtgaacactatcccatatcaccagctcaccgtctttcatcgccatacggaactctggatgagcattcatcaggcgggcaagaatgtgaataaaggccggataaaacttgtgcttatttttctttacggtctttaaaaaggccgtaatatccagctgaacggtctggttataggtacattgagcaactgactgaaatgcctcaaaatgttctttacgatgccattgggatatatcaacggtggtatatccagtgatttttttctccattttagcttccttagctcctgaaaatctcgataactcaaaaaatacgcccggtagtgatcttatttcattatggtgaaagttggaacctcttacgtgccgatcaacgtctcattttcgccaaaagttggcccagggcttcccggtatcaacagggacaccaggatttatttattctgcgaagtgatcttccgtcacaggtatttattcggcgcaaagtgcgtcgggtgatgctgccaacttactgatttagtgtatgatggtgtttttgaggtgctccagtggcttctgtttctatcagctgtccctcctgttcagctactgacggggtggtgcgtaacggcaaaagcaccgccggacatcagcgctagcggagtgtatactggcttactatgttggcactgatgagggtgtcagtgaagtgcttcatgtggcaggagaaaaaaggctgcaccggtgcgtcagcagaatatgtgatacaggatatattccgcttcctcgctcactgactcgctacgctcggtcgttcgactgcggcgagcggaaatggcttacgaacggggcggagatttcctggaagatgccaggaagatacttaacagggaagtgagagggccgcggcaaagccgtttttccataggctccgcccccctgacaagcatcacgaaatctgacgctcaaatcagtggtggcgaaacccgacaggactataaagataccaggcgtttccccctggcggctccctcgtgcgctctcctgttcctgcctttcggtttaccggtgtcattccgctgttatggccgcgtttgtctcattccacgcctgacactcagttccgggtaggcagttcgctccaagctggactgtatgcacgaaccccccgttcagtccgaccgctgcgccttatccggtaactatcgtcttgagtccaacccggaaagacatgcaaaagcaccactggcagcagccactggtaattgatttagaggagttagtcttgaagtcatgcgccggttaaggctaaactgaaaggacaagttttggtgactgcgctcctccaagccagttacctcggttcaaagagttggtagctcagagaaccttcgaaaaaccgccctgcaaggcggttttttcgttttcagagcaagagattacgcgcagaccaaaacgatctcaagaagatcatcttattaatcagataaaatatttctagatttcagtgcaatttatctcttcaaatgtagcacctgaagtcagccccatacgatataagttgtaattctcatgttagtcatgccccgcgcccaccggaaggagctgactgggttgaaggctctcaagggcatcggtcgagatcccggtgcctaatgagtgagctaacttacattaattgcgttgcgca

SEQ ID NO: 905 - DNA, 4123 bp, Synthetic construct
  source 1..4123: mol_type = other DNA
acacgatataaaaccatctcattgcttgctgggttaactgagttgctgaatttttttctagaatttcgcaaaatttaataggtaaaccttgtttttttaaatttacgatgatataaaaataatgccctaaacaaaggtttaggggtattgtacaggttgtcaagcctcccacaggtcttggtgaaaccaatcactgtgacgacggtaagcaacacttggatgattaaggatatattcataattgactccacgctactgattacattatacagcatatctaacatttgcggcgaggttcacaatttgtatttaggtactgattgtggatgagaaggttggagaaagaccacttggttaagccggaggatgtgtcctagaattgtcgctattctgtcatcctccggttttgctaatttcattcagggaatataatgaataatgatgattacccatggttcagaaaacgtggttatttgcatttcgatgaacctgtttcattaaaaaaagcggttaaatatgtttcctctccagaaaaaataataaaacattcttttctgccatttttaagctttgaagtaaaatcgtttaaaatcaaaaaagacaaatcaacaaaacaattaagtaaaactgaaaaattaagacctattgcctattcctcacatttggatagtcatatttatgcattttacgcagaatatcttactggacattatgaattattgatccaagaaaacaatttacacgagaacatccttgccttcagatctttaaataaaagcaatatagaatttgccaagagagcatttgatacaattactgaaatgggtgagtgtagcgctgttgcattagatctttctggtttttttgacaatttagatcatcaaattttgaaacaccagtggtgcaaagttattgggactgaagcgttgccgcaagaccattttgccatatacaaaagtataacaagatattctaaagttgataaaaatagagcgtatgagattttaggtatatcaaagaataaccccaagtataatagacgcaagatctgcacccctgttgattttagaaataagattagaaaaaatggtcttattatagttaataattcccaaaaaggtataccccaaggctcgccaattagtgctctactttcaaatatatatatgcttgactttgatattgaaatgagagattacgcgcaggaacgtggtggccattattatcgctattgtgatgatatgctattcattgtaccaactaagtataataaaactctagcaggtgatgtagcccagcggattaagcatcttaaggtagaactcaatactaagaaaactgagattcgagattttatatacaaagacagtaccttagtggcaaatatgcctttacagtatcttgggtttatttttgatgggagtaatatattattacgttcatcttctctcgcaagatattcggaacgaatgaaaagaggtgtccgcttagcaaaagctacaatggacagcaagaataggattagagaaaataaaggtgaagctttaaaagctttatttaagaaaaaattatatgccagatattcacatattggaagaaggaattttttgacttatggttatcgcgccgcgaagatcatgaattcgaaagctataaaaagacagttaaaaccattgcagaaaagattggaaaatgaaatactaaaataaatatttgctggcccgaatcatacagggccacaatacagttgaaaacaagctataataaacaacatctaatttttatataccgcaataactagcataaccccttggggcctctaaacgggtcttgaggggttttttgctgaaacctcaggcatttgagaagcacacggtcacactgcttccggtagtcaataaaccggtaaaccagcaatagacataagcggctatttaacgaccctgccctgaaccgacgaccgggtcgaatttgctttcgaatttctgccattcatccgcttattatcacttattcaggcgtagcaccaggcgtttaagggcaccaataactgccttaaaaaaattacgccccgccctgccactcatcgcaatactgttgtaattcatttaacattctgccgacatggaagccatcacagacggcatgatgaacctgaatcgccagcggcatcagcaccttgtcgccttgcgtataatatttgcccatagtgaaaacgggggcgaagaagttgtccatattggccacgtttaaatcaaaactggtgaaactcacccagggattggctgagacgaaaaacatattctcaataaaccctttagggaaataggccaggttttcaccgtaacacgccacatcttgcgaatatatgtgtagaaactgccggaaatcgtcgtggtattcactccagagcgatgaaaacgtttcagtttgctcatggaaaacggtgtaacaagggtgaacactatcccatatcaccagctcaccgtctttcatcgccatacggaactctggatgagcattcatcaggcgggcaagaatgtgaataaaggccggataaaacttgtgcttatttttctttacggtctttaaaaaggccgtaatatccagctgaacggtctggttataggtacattgagcaactgactgaaatgcctcaaaatgttctttacgatgccattgggatatatcaacggtggtatatccagtgatttttttctccattttagcttccttagctcctgaaaatctcgataactcaaaaaatacgcccggtagtgatcttatttcattatggtgaaagttggaacctcttacgtgccgatcaacgtctcattttcgccaaaagttggcccagggcttcccggtatcaacagggacaccaggatttatttattctgcgaagtgatcttccgtcacaggtatttattcggcgcaaagtgcgtcgggtgatgctgccaacttactgatttagtgtatgatggtgtttttgaggtgctccagtggcttctgtttctatcagctgtccctcctgttcagctactgacggggtggtgcgtaacggcaaaagcaccgccggacatcagcgctagcggagtgtatactggcttactatgttggcactgatgagggtgtcagtgaagtgcttcatgtggcaggagaaaaaaggctgcaccggtgcgtcagcagaatatgtgatacaggatatattccgcttcctcgctcactgactcgctacgctcggtcgttcgactgcggcgagcggaaatggcttacgaacggggcggagatttcctggaagatgccaggaagatacttaacagggaagtgagagggccgcggcaaagccgtttttccataggctccgcccccctgacaagcatcacgaaatctgacgctcaaatcagtggtggcgaaacccgacaggactataaagataccaggcgtttccccctggcggctccctcgtgcgctctcctgttcctgcctttcggtttaccggtgtcattccgctgttatggccgcgtttgtctcattccacgcctgacactcagttccgggtaggcagttcgctccaagctggactgtatgcacgaaccccccgttcagtccgaccgctgcgccttatccggtaactatcgtcttgagtccaacccggaaagacatgcaaaagcaccactggcagcagccactggtaattgatttagaggagttagtcttgaagtcatgcgccggttaaggctaaactgaaaggacaagttttggtgactgcgctcctccaagccagttacctcggttcaaagagttggtagctcagagaaccttcgaaaaaccgccctgcaaggcggttttttcgttttcagagcaagagattacgcgcagaccaaaacgatctcaagaagatcatcttattaatcagataaaatatttctagatttcagtgcaatttatctcttcaaatgtagcacctgaagtcagccccatacgatataagttgtaattctcatgttagtcatgccccgcgcccaccggaaggagctgactgggttgaaggctctcaagggcatcggtcgagatcccggtgcctaatgagtgagctaacttacattaattgcgttgcgca

SEQ ID NO: 906 - DNA, 4115 bp, Synthetic construct
  source 1..4115: mol_type = other DNA
acacgatataaaaccatctcattgcttgctgggttaactgagttgctgaatttttttctagaatttcgcaaaatttaataggtaaaccttgtttttttaaatttacgatgatataaaaataatgccctaaacaaaggtttaggggtattgtacaggttgtcaagcctcccacaggtcttggtgaaaccaatcactgtgacgacggtaagcaacacttggatgatattcataattgactccacgctactgattactattatacagcatatctaacatttgcggcgaggttcacaatttgtatttaggtactgattgtggatgagaaggttggagaaagaccacttggttaagccggaggatgtgtcctagaattgtcgctattctgtcatcctccggttttgctaatttcattcagggaatataatgaataatgatgattacccatggttcagaaaacgtggttatttgcatttcgatgaacctgtttcattaaaaaaagcggttaaatatgtttcctctccagaaaaaataataaaacattcttttctgccatttttaagctttgaagtaaaatcgtttaaaatcaaaaaagacaaatcaacaaaacaattaagtaaaactgaaaaattaagacctattgcctattcctcacatttggatagtcatatttatgcattttacgcagaatatcttactggacattatgaattattgatccaagaaaacaatttacacgagaacatccttgccttcagatctttaaataaaagcaatatagaatttgccaagagagcatttgatacaattactgaaatgggtgagtgtagcgctgttgcattagatctttctggtttttttgacaatttagatcatcaaattttgaaacaccagtggtgcaaagttattgggactgaagcgttgccgcaagaccattttgccatatacaaaagtataacaagatattctaaagttgataaaaatagagcgtatgagattttaggtatatcaaagaataaccccaagtataatagacgcaagatctgcacccctgttgattttagaaataagattagaaaaaatggtcttattatagttaataattcccaaaaaggtataccccaaggctcgccaattagtgctctactttcaaatatatatatgcttgactttgatattgaaatgagagattacgcgcaggaacgtggtggccattattatcgctattgtgatgatatgctattcattgtaccaactaagtataataaaactctagcaggtgatgtagcccagcggattaagcatcttaaggtagaactcaatactaagaaaactgagattcgagattttatatacaaagacagtaccttagtggcaaatatgcctttacagtatcttgggtttatttttgatgggagtaatatattattacgttcatcttctctcgcaagatattcggaacgaatgaaaagaggtgtccgcttagcaaaagctacaatggacagcaagaataggattagagaaaataaaggtgaagctttaaaagctttatttaagaaaaaattatatgccagatattcacatattggaagaaggaattttttgacttatggttatcgcgccgcgaagatcatgaattcgaaagctataaaaagacagttaaaaccattgcagaaaagattggaaaatgaaatactaaaataaatatttgctggcccgaatcatacagggccacaatacagttgaaaacaagctataataaacaacatctaatttttatataccgcaataactagcataaccccttggggcctctaaacgggtcttgaggggttttttgctgaaacctcaggcatttgagaagcacacggtcacactgcttccggtagtcaataaaccggtaaaccagcaatagacataagcggctatttaacgaccctgccctgaaccgacgaccgggtcgaatttgctttcgaatttctgccattcatccgcttattatcacttattcaggcgtagcaccaggcgtttaagggcaccaataactgccttaaaaaaattacgccccgccctgccactcatcgcaatactgttgtaattcatttaacattctgccgacatggaagccatcacagacggcatgatgaacctgaatcgccagcggcatcagcaccttgtcgccttgcgtataatatttgcccatagtgaaaacgggggcgaagaagttgtccatattggccacgtttaaatcaaaactggtgaaactcacccagggattggctgagacgaaaaacatattctcaataaaccctttagggaaataggccaggttttcaccgtaacacgccacatcttgcgaatatatgtgtagaaactgccggaaatcgtcgtggtattcactccagagcgatgaaaacgtttcagtttgctcatggaaaacggtgtaacaagggtgaacactatcccatatcaccagctcaccgtctttcatcgccatacggaactctggatgagcattcatcaggcgggcaagaatgtgaataaaggccggataaaacttgtgcttatttttctttacggtctttaaaaaggccgtaatatccagctgaacggtctggttataggtacattgagcaactgactgaaatgcctcaaaatgttctttacgatgccattgggatatatcaacggtggtatatccagtgatttttttctccattttagcttccttagctcctgaaaatctcgataactcaaaaaatacgcccggtagtgatcttatttcattatggtgaaagttggaacctcttacgtgccgatcaacgtctcattttcgccaaaagttggcccagggcttcccggtatcaacagggacaccaggatttatttattctgcgaagtgatcttccgtcacaggtatttattcggcgcaaagtgcgtcgggtgatgctgccaacttactgatttagtgtatgatggtgtttttgaggtgctccagtggcttctgtttctatcagctgtccctcctgttcagctactgacggggtggtgcgtaacggcaaaagcaccgccggacatcagcgctagcggagtgtatactggcttactatgttggcactgatgagggtgtcagtgaagtgcttcatgtggcaggagaaaaaaggctgcaccggtgcgtcagcagaatatgtgatacaggatatattccgcttcctcgctcactgactcgctacgctcggtcgttcgactgcggcgagcggaaatggcttacgaacggggcggagatttcctggaagatgccaggaagatacttaacagggaagtgagagggccgcggcaaagccgtttttccataggctccgcccccctgacaagcatcacgaaatctgacgctcaaatcagtggtggcgaaacccgacaggactataaagataccaggcgtttccccctggcggctccctcgtgcgctctcctgttcctgcctttcggtttaccggtgtcattccgctgttatggccgcgtttgtctcattccacgcctgacactcagttccgggtaggcagttcgctccaagctggactgtatgcacgaaccccccgttcagtccgaccgctgcgccttatccggtaactatcgtcttgagtccaacccggaaagacatgcaaaagcaccactggcagcagccactggtaattgatttagaggagttagtcttgaagtcatgcgccggttaaggctaaactgaaaggacaagttttggtgactgcgctcctccaagccagttacctcggttcaaagagttggtagctcagagaaccttcgaaaaaccgccctgcaaggcggttttttcgttttcagagcaagagattacgcgcagaccaaaacgatctcaagaagatcatcttattaatcagataaaatatttctagatttcagtgcaatttatctcttcaaatgtagcacctgaagtcagccccatacgatataagttgtaattctcatgttagtcatgccccgcgcccaccggaaggagctgactgggttgaaggctctcaagggcatcggtcgagatcccggtgcctaatgagtgagctaacttacattaattgcgttgcgca

SEQ ID NO: 907 - DNA, 4116 bp, Synthetic construct
  source 1..4116: mol_type = other DNA
acacgatataaaaccatctcattgcttgctgggttaactgagttgctgaatttttttctagaatttcgcaaaatttaataggtaaaccttgtttttttaaatttacgatgatataaaaataatgccctaaacaaaggtttaggggtattgtacaggttgtcaagcctcccacaggtcttggtgaaaccaatcactgtgacgacggtaagcaacacttggatgatattcataattgactccacgctactgattactaattatacagcatatctaacatttgcggcgaggttcacaatttgtatttaggtactgattgtggatgagaaggttggagaaagaccacttggttaagccggaggatgtgtcctagaattgtcgctattctgtcatcctccggttttgctaatttcattcagggaatataatgaataatgatgattacccatggttcagaaaacgtggttatttgcatttcgatgaacctgtttcattaaaaaaagcggttaaatatgtttcctctccagaaaaaataataaaacattcttttctgccatttttaagctttgaagtaaaatcgtttaaaatcaaaaaagacaaatcaacaaaacaattaagtaaaactgaaaaattaagacctattgcctattcctcacatttggatagtcatatttatgcattttacgcagaatatcttactggacattatgaattattgatccaagaaaacaatttacacgagaacatccttgccttcagatctttaaataaaagcaatatagaatttgccaagagagcatttgatacaattactgaaatgggtgagtgtagcgctgttgcattagatctttctggtttttttgacaatttagatcatcaaattttgaaacaccagtggtgcaaagttattgggactgaagcgttgccgcaagaccattttgccatatacaaaagtataacaagatattctaaagttgataaaaatagagcgtatgagattttaggtatatcaaagaataaccccaagtataatagacgcaagatctgcacccctgttgattttagaaataagattagaaaaaatggtcttattatagttaataattcccaaaaaggtataccccaaggctcgccaattagtgctctactttcaaatatatatatgcttgactttgatattgaaatgagagattacgcgcaggaacgtggtggccattattatcgctattgtgatgatatgctattcattgtaccaactaagtataataaaactctagcaggtgatgtagcccagcggattaagcatcttaaggtagaactcaatactaagaaaactgagattcgagattttatatacaaagacagtaccttagtggcaaatatgcctttacagtatcttgggtttatttttgatgggagtaatatattattacgttcatcttctctcgcaagatattcggaacgaatgaaaagaggtgtccgcttagcaaaagctacaatggacagcaagaataggattagagaaaataaaggtgaagctttaaaagctttatttaagaaaaaattatatgccagatattcacatattggaagaaggaattttttgacttatggttatcgcgccgcgaagatcatgaattcgaaagctataaaaagacagttaaaaccattgcagaaaagattggaaaatgaaatactaaaataaatatttgctggcccgaatcatacagggccacaatacagttgaaaacaagctataataaacaacatctaatttttatataccgcaataactagcataaccccttggggcctctaaacgggtcttgaggggttttttgctgaaacctcaggcatttgagaagcacacggtcacactgcttccggtagtcaataaaccggtaaaccagcaatagacataagcggctatttaacgaccctgccctgaaccgacgaccgggtcgaatttgctttcgaatttctgccattcatccgcttattatcacttattcaggcgtagcaccaggcgtttaagggcaccaataactgccttaaaaaaattacgccccgccctgccactcatcgcaatactgttgtaattcatttaacattctgccgacatggaagccatcacagacggcatgatgaacctgaatcgccagcggcatcagcaccttgtcgccttgcgtataatatttgcccatagtgaaaacgggggcgaagaagttgtccatattggccacgtttaaatcaaaactggtgaaactcacccagggattggctgagacgaaaaacatattctcaataaaccctttagggaaataggccaggttttcaccgtaacacgccacatcttgcgaatatatgtgtagaaactgccggaaatcgtcgtggtattcactccagagcgatgaaaacgtttcagtttgctcatggaaaacggtgtaacaagggtgaacactatcccatatcaccagctcaccgtctttcatcgccatacggaactctggatgagcattcatcaggcgggcaagaatgtgaataaaggccggataaaacttgtgcttatttttctttacggtctttaaaaaggccgtaatatccagctgaacggtctggttataggtacattgagcaactgactgaaatgcctcaaaatgttctttacgatgccattgggatatatcaacggtggtatatccagtgatttttttctccattttagcttccttagctcctgaaaatctcgataactcaaaaaatacgcccggtagtgatcttatttcattatggtgaaagttggaacctcttacgtgccgatcaacgtctcattttcgccaaaagttggcccagggcttcccggtatcaacagggacaccaggatttatttattctgcgaagtgatcttccgtcacaggtatttattcggcgcaaagtgcgtcgggtgatgctgccaacttactgatttagtgtatgatggtgtttttgaggtgctccagtggcttctgtttctatcagctgtccctcctgttcagctactgacggggtggtgcgtaacggcaaaagcaccgccggacatcagcgctagcggagtgtatactggcttactatgttggcactgatgagggtgtcagtgaagtgcttcatgtggcaggagaaaaaaggctgcaccggtgcgtcagcagaatatgtgatacaggatatattccgcttcctcgctcactgactcgctacgctcggtcgttcgactgcggcgagcggaaatggcttacgaacggggcggagatttcctggaagatgccaggaagatacttaacagggaagtgagagggccgcggcaaagccgtttttccataggctccgcccccctgacaagcatcacgaaatctgacgctcaaatcagtggtggcgaaacccgacaggactataaagataccaggcgtttccccctggcggctccctcgtgcgctctcctgttcctgcctttcggtttaccggtgtcattccgctgttatggccgcgtttgtctcattccacgcctgacactcagttccgggtaggcagttcgctccaagctggactgtatgcacgaaccccccgttcagtccgaccgctgcgccttatccggtaactatcgtcttgagtccaacccggaaagacatgcaaaagcaccactggcagcagccactggtaattgatttagaggagttagtcttgaagtcatgcgccggttaaggctaaactgaaaggacaagttttggtgactgcgctcctccaagccagttacctcggttcaaagagttggtagctcagagaaccttcgaaaaaccgccctgcaaggcggttttttcgttttcagagcaagagattacgcgcagaccaaaacgatctcaagaagatcatcttattaatcagataaaatatttctagatttcagtgcaatttatctcttcaaatgtagcacctgaagtcagccccatacgatataagttgtaattctcatgttagtcatgccccgcgcccaccggaaggagctgactgggttgaaggctctcaagggcatcggtcgagatcccggtgcctaatgagtgagctaacttacattaattgcgttgcgca

SEQ ID NO: 908 - DNA, 4117 bp, Synthetic construct
  source 1..4117: mol_type = other DNA
acacgatataaaaccatctcattgcttgctgggttaactgagttgctgaatttttttctagaatttcgcaaaatttaataggtaaaccttgtttttttaaatttacgatgatataaaaataatgccctaaacaaaggtttaggggtattgtacaggttgtcaagcctcccacaggtcttggtgaaaccaatcactgtgacgacggtaagcaacacttggatgatattcataattgactccacgctactgattactacattatacagcatatctaacatttgcggcgaggttcacaatttgtatttaggtactgattgtggatgagaaggttggagaaagaccacttggttaagccggaggatgtgtcctagaattgtcgctattctgtcatcctccggttttgctaatttcattcagggaatataatgaataatgatgattacccatggttcagaaaacgtggttatttgcatttcgatgaacctgtttcattaaaaaaagcggttaaatatgtttcctctccagaaaaaataataaaacattcttttctgccatttttaagctttgaagtaaaatcgtttaaaatcaaaaaagacaaatcaacaaaacaattaagtaaaactgaaaaattaagacctattgcctattcctcacatttggatagtcatatttatgcattttacgcagaatatcttactggacattatgaattattgatccaagaaaacaatttacacgagaacatccttgccttcagatctttaaataaaagcaatatagaatttgccaagagagcatttgatacaattactgaaatgggtgagtgtagcgctgttgcattagatctttctggtttttttgacaatttagatcatcaaattttgaaacaccagtggtgcaaagttattgggactgaagcgttgccgcaagaccattttgccatatacaaaagtataacaagatattctaaagttgataaaaatagagcgtatgagattttaggtatatcaaagaataaccccaagtataatagacgcaagatctgcacccctgttgattttagaaataagattagaaaaaatggtcttattatagttaataattcccaaaaaggtataccccaaggctcgccaattagtgctctactttcaaatatatatatgcttgactttgatattgaaatgagagattacgcgcaggaacgtggtggccattattatcgctattgtgatgatatgctattcattgtaccaactaagtataataaaactctagcaggtgatgtagcccagcggattaagcatcttaaggtagaactcaatactaagaaaactgagattcgagattttatatacaaagacagtaccttagtggcaaatatgcctttacagtatcttgggtttatttttgatgggagtaatatattattacgttcatcttctctcgcaagatattcggaacgaatgaaaagaggtgtccgcttagcaaaagctacaatggacagcaagaataggattagagaaaataaaggtgaagctttaaaagctttatttaagaaaaaattatatgccagatattcacatattggaagaaggaattttttgacttatggttatcgcgccgcgaagatcatgaattcgaaagctataaaaagacagttaaaaccattgcagaaaagattggaaaatgaaatactaaaataaatatttgctggcccgaatcatacagggccacaatacagttgaaaacaagctataataaacaacatctaatttttatataccgcaataactagcataaccccttggggcctctaaacgggtcttgaggggttttttgctgaaacctcaggcatttgagaagcacacggtcacactgcttccggtagtcaataaaccggtaaaccagcaatagacataagcggctatttaacgaccctgccctgaaccgacgaccgggtcgaatttgctttcgaatttctgccattcatccgcttattatcacttattcaggcgtagcaccaggcgtttaagggcaccaataactgccttaaaaaaattacgccccgccctgccactcatcgcaatactgttgtaattcatttaacattctgccgacatggaagccatcacagacggcatgatgaacctgaatcgccagcggcatcagcaccttgtcgccttgcgtataatatttgcccatagtgaaaacgggggcgaagaagttgtccatattggccacgtttaaatcaaaactggtgaaactcacccagggattggctgagacgaaaaacatattctcaataaaccctttagggaaataggccaggttttcaccgtaacacgccacatcttgcgaatatatgtgtagaaactgccggaaatcgtcgtggtattcactccagagcgatgaaaacgtttcagtttgctcatggaaaacggtgtaacaagggtgaacactatcccatatcaccagctcaccgtctttcatcgccatacggaactctggatgagcattcatcaggcgggcaagaatgtgaataaaggccggataaaacttgtgcttatttttctttacggtctttaaaaaggccgtaatatccagctgaacggtctggttataggtacattgagcaactgactgaaatgcctcaaaatgttctttacgatgccattgggatatatcaacggtggtatatccagtgatttttttctccattttagcttccttagctcctgaaaatctcgataactcaaaaaatacgcccggtagtgatcttatttcattatggtgaaagttggaacctcttacgtgccgatcaacgtctcattttcgccaaaagttggcccagggcttcccggtatcaacagggacaccaggatttatttattctgcgaagtgatcttccgtcacaggtatttattcggcgcaaagtgcgtcgggtgatgctgccaacttactgatttagtgtatgatggtgtttttgaggtgctccagtggcttctgtttctatcagctgtccctcctgttcagctactgacggggtggtgcgtaacggcaaaagcaccgccggacatcagcgctagcggagtgtatactggcttactatgttggcactgatgagggtgtcagtgaagtgcttcatgtggcaggagaaaaaaggctgcaccggtgcgtcagcagaatatgtgatacaggatatattccgcttcctcgctcactgactcgctacgctcggtcgttcgactgcggcgagcggaaatggcttacgaacggggcggagatttcctggaagatgccaggaagatacttaacagggaagtgagagggccgcggcaaagccgtttttccataggctccgcccccctgacaagcatcacgaaatctgacgctcaaatcagtggtggcgaaacccgacaggactataaagataccaggcgtttccccctggcggctccctcgtgcgctctcctgttcctgcctttcggtttaccggtgtcattccgctgttatggccgcgtttgtctcattccacgcctgacactcagttccgggtaggcagttcgctccaagctggactgtatgcacgaaccccccgttcagtccgaccgctgcgccttatccggtaactatcgtcttgagtccaacccggaaagacatgcaaaagcaccactggcagcagccactggtaattgatttagaggagttagtcttgaagtcatgcgccggttaaggctaaactgaaaggacaagttttggtgactgcgctcctccaagccagttacctcggttcaaagagttggtagctcagagaaccttcgaaaaaccgccctgcaaggcggttttttcgttttcagagcaagagattacgcgcagaccaaaacgatctcaagaagatcatcttattaatcagataaaatatttctagatttcagtgcaatttatctcttcaaatgtagcacctgaagtcagccccatacgatataagttgtaattctcatgttagtcatgccccgcgcccaccggaaggagctgactgggttgaaggctctcaagggcatcggtcgagatcccggtgcctaatgagtgagctaacttacattaattgcgttgcgca

SEQ ID NO: 909 - DNA, 4118 bp, Synthetic construct
  source 1..4118: mol_type = other DNA
acacgatataaaaccatctcattgcttgctgggttaactgagttgctgaatttttttctagaatttcgcaaaatttaataggtaaaccttgtttttttaaatttacgatgatataaaaataatgccctaaacaaaggtttaggggtattgtacaggttgtcaagcctcccacaggtcttggtgaaaccaatcactgtgacgacggtaagcaacacttggatgatattcataattgactccacgctactgattacttacattatacagcatatctaacatttgcggcgaggttcacaatttgtatttaggtactgattgtggatgagaaggttggagaaagaccacttggttaagccggaggatgtgtcctagaattgtcgctattctgtcatcctccggttttgctaatttcattcagggaatataatgaataatgatgattacccatggttcagaaaacgtggttatttgcatttcgatgaacctgtttcattaaaaaaagcggttaaatatgtttcctctccagaaaaaataataaaacattcttttctgccatttttaagctttgaagtaaaatcgtttaaaatcaaaaaagacaaatcaacaaaacaattaagtaaaactgaaaaattaagacctattgcctattcctcacatttggatagtcatatttatgcattttacgcagaatatcttactggacattatgaattattgatccaagaaaacaatttacacgagaacatccttgccttcagatctttaaataaaagcaatatagaatttgccaagagagcatttgatacaattactgaaatgggtgagtgtagcgctgttgcattagatctttctggtttttttgacaatttagatcatcaaattttgaaacaccagtggtgcaaagttattgggactgaagcgttgccgcaagaccattttgccatatacaaaagtataacaagatattctaaagttgataaaaatagagcgtatgagattttaggtatatcaaagaataaccccaagtataatagacgcaagatctgcacccctgttgattttagaaataagattagaaaaaatggtcttattatagttaataattcccaaaaaggtataccccaaggctcgccaattagtgctctactttcaaatatatatatgcttgactttgatattgaaatgagagattacgcgcaggaacgtggtggccattattatcgctattgtgatgatatgctattcattgtaccaactaagtataataaaactctagcaggtgatgtagcccagcggattaagcatcttaaggtagaactcaatactaagaaaactgagattcgagattttatatacaaagacagtaccttagtggcaaatatgcctttacagtatcttgggtttatttttgatgggagtaatatattattacgttcatcttctctcgcaagatattcggaacgaatgaaaagaggtgtccgcttagcaaaagctacaatggacagcaagaataggattagagaaaataaaggtgaagctttaaaagctttatttaagaaaaaattatatgccagatattcacatattggaagaaggaattttttgacttatggttatcgcgccgcgaagatcatgaattcgaaagctataaaaagacagttaaaaccattgcagaaaagattggaaaatgaaatactaaaataaatatttgctggcccgaatcatacagggccacaatacagttgaaaacaagctataataaacaacatctaatttttatataccgcaataactagcataaccccttggggcctctaaacgggtcttgaggggttttttgctgaaacctcaggcatttgagaagcacacggtcacactgcttccggtagtcaataaaccggtaaaccagcaatagacataagcggctatttaacgaccctgccctgaaccgacgaccgggtcgaatttgctttcgaatttctgccattcatccgcttattatcacttattcaggcgtagcaccaggcgtttaagggcaccaataactgccttaaaaaaattacgccccgccctgccactcatcgcaatactgttgtaattcatttaacattctgccgacatggaagccatcacagacggcatgatgaacctgaatcgccagcggcatcagcaccttgtcgccttgcgtataatatttgcccatagtgaaaacgggggcgaagaagttgtccatattggccacgtttaaatcaaaactggtgaaactcacccagggattggctgagacgaaaaacatattctcaataaaccctttagggaaataggccaggttttcaccgtaacacgccacatcttgcgaatatatgtgtagaaactgccggaaatcgtcgtggtattcactccagagcgatgaaaacgtttcagtttgctcatggaaaacggtgtaacaagggtgaacactatcccatatcaccagctcaccgtctttcatcgccatacggaactctggatgagcattcatcaggcgggcaagaatgtgaataaaggccggataaaacttgtgcttatttttctttacggtctttaaaaaggccgtaatatccagctgaacggtctggttataggtacattgagcaactgactgaaatgcctcaaaatgttctttacgatgccattgggatatatcaacggtggtatatccagtgatttttttctccattttagcttccttagctcctgaaaatctcgataactcaaaaaatacgcccggtagtgatcttatttcattatggtgaaagttggaacctcttacgtgccgatcaacgtctcattttcgccaaaagttggcccagggcttcccggtatcaacagggacaccaggatttatttattctgcgaagtgatcttccgtcacaggtatttattcggcgcaaagtgcgtcgggtgatgctgccaacttactgatttagtgtatgatggtgtttttgaggtgctccagtggcttctgtttctatcagctgtccctcctgttcagctactgacggggtggtgcgtaacggcaaaagcaccgccggacatcagcgctagcggagtgtatactggcttactatgttggcactgatgagggtgtcagtgaagtgcttcatgtggcaggagaaaaaaggctgcaccggtgcgtcagcagaatatgtgatacaggatatattccgcttcctcgctcactgactcgctacgctcggtcgttcgactgcggcgagcggaaatggcttacgaacggggcggagatttcctggaagatgccaggaagatacttaacagggaagtgagagggccgcggcaaagccgtttttccataggctccgcccccctgacaagcatcacgaaatctgacgctcaaatcagtggtggcgaaacccgacaggactataaagataccaggcgtttccccctggcggctccctcgtgcgctctcctgttcctgcctttcggtttaccggtgtcattccgctgttatggccgcgtttgtctcattccacgcctgacactcagttccgggtaggcagttcgctccaagctggactgtatgcacgaaccccccgttcagtccgaccgctgcgccttatccggtaactatcgtcttgagtccaacccggaaagacatgcaaaagcaccactggcagcagccactggtaattgatttagaggagttagtcttgaagtcatgcgccggttaaggctaaactgaaaggacaagttttggtgactgcgctcctccaagccagttacctcggttcaaagagttggtagctcagagaaccttcgaaaaaccgccctgcaaggcggttttttcgttttcagagcaagagattacgcgcagaccaaaacgatctcaagaagatcatcttattaatcagataaaatatttctagatttcagtgcaatttatctcttcaaatgtagcacctgaagtcagccccatacgatataagttgtaattctcatgttagtcatgccccgcgcccaccggaaggagctgactgggttgaaggctctcaagggcatcggtcgagatcccggtgcctaatgagtgagctaacttacattaattgcgttgcgca

SEQ ID NO: 910 - DNA, 4119 bp, Synthetic construct
  source 1..4119: mol_type = other DNA
acacgatataaaaccatctcattgcttgctgggttaactgagttgctgaatttttttctagaatttcgcaaaatttaataggtaaaccttgtttttttaaatttacgatgatataaaaataatgccctaaacaaaggtttaggggtattgtacaggttgtcaagcctcccacaggtcttggtgaaaccaatcactgtgacgacggtaagcaacacttggatgatattcataattgactccacgctactgattacattacattatacagcatatctaacatttgcggcgaggttcacaatttgtatttaggtactgattgtggatgagaaggttggagaaagaccacttggttaagccggaggatgtgtcctagaattgtcgctattctgtcatcctccggttttgctaatttcattcagggaatataatgaataatgatgattacccatggttcagaaaacgtggttatttgcatttcgatgaacctgtttcattaaaaaaagcggttaaatatgtttcctctccagaaaaaataataaaacattcttttctgccatttttaagctttgaagtaaaatcgtttaaaatcaaaaaagacaaatcaacaaaacaattaagtaaaactgaaaaattaagacctattgcctattcctcacatttggatagtcatatttatgcattttacgcagaatatcttactggacattatgaattattgatccaagaaaacaatttacacgagaacatccttgccttcagatctttaaataaaagcaatatagaatttgccaagagagcatttgatacaattactgaaatgggtgagtgtagcgctgttgcattagatctttctggtttttttgacaatttagatcatcaaattttgaaacaccagtggtgcaaagttattgggactgaagcgttgccgcaagaccattttgccatatacaaaagtataacaagatattctaaagttgataaaaatagagcgtatgagattttaggtatatcaaagaataaccccaagtataatagacgcaagatctgcacccctgttgattttagaaataagattagaaaaaatggtcttattatagttaataattcccaaaaaggtataccccaaggctcgccaattagtgctctactttcaaatatatatatgcttgactttgatattgaaatgagagattacgcgcaggaacgtggtggccattattatcgctattgtgatgatatgctattcattgtaccaactaagtataataaaactctagcaggtgatgtagcccagcggattaagcatcttaaggtagaactcaatactaagaaaactgagattcgagattttatatacaaagacagtaccttagtggcaaatatgcctttacagtatcttgggtttatttttgatgggagtaatatattattacgttcatcttctctcgcaagatattcggaacgaatgaaaagaggtgtccgcttagcaaaagctacaatggacagcaagaataggattagagaaaataaaggtgaagctttaaaagctttatttaagaaaaaattatatgccagatattcacatattggaagaaggaattttttgacttatggttatcgcgccgcgaagatcatgaattcgaaagctataaaaagacagttaaaaccattgcagaaaagattggaaaatgaaatactaaaataaatatttgctggcccgaatcatacagggccacaatacagttgaaaacaagctataataaacaacatctaatttttatataccgcaataactagcataaccccttggggcctctaaacgggtcttgaggggttttttgctgaaacctcaggcatttgagaagcacacggtcacactgcttccggtagtcaataaaccggtaaaccagcaatagacataagcggctatttaacgaccctgccctgaaccgacgaccgggtcgaatttgctttcgaatttctgccattcatccgcttattatcacttattcaggcgtagcaccaggcgtttaagggcaccaataactgccttaaaaaaattacgccccgccctgccactcatcgcaatactgttgtaattcatttaacattctgccgacatggaagccatcacagacggcatgatgaacctgaatcgccagcggcatcagcaccttgtcgccttgcgtataatatttgcccatagtgaaaacgggggcgaagaagttgtccatattggccacgtttaaatcaaaactggtgaaactcacccagggattggctgagacgaaaaacatattctcaataaaccctttagggaaataggccaggttttcaccgtaacacgccacatcttgcgaatatatgtgtagaaactgccggaaatcgtcgtggtattcactccagagcgatgaaaacgtttcagtttgctcatggaaaacggtgtaacaagggtgaacactatcccatatcaccagctcaccgtctttcatcgccatacggaactctggatgagcattcatcaggcgggcaagaatgtgaataaaggccggataaaacttgtgcttatttttctttacggtctttaaaaaggccgtaatatccagctgaacggtctggttataggtacattgagcaactgactgaaatgcctcaaaatgttctttacgatgccattgggatatatcaacggtggtatatccagtgatttttttctccattttagcttccttagctcctgaaaatctcgataactcaaaaaatacgcccggtagtgatcttatttcattatggtgaaagttggaacctcttacgtgccgatcaacgtctcattttcgccaaaagttggcccagggcttcccggtatcaacagggacaccaggatttatttattctgcgaagtgatcttccgtcacaggtatttattcggcgcaaagtgcgtcgggtgatgctgccaacttactgatttagtgtatgatggtgtttttgaggtgctccagtggcttctgtttctatcagctgtccctcctgttcagctactgacggggtggtgcgtaacggcaaaagcaccgccggacatcagcgctagcggagtgtatactggcttactatgttggcactgatgagggtgtcagtgaagtgcttcatgtggcaggagaaaaaaggctgcaccggtgcgtcagcagaatatgtgatacaggatatattccgcttcctcgctcactgactcgctacgctcggtcgttcgactgcggcgagcggaaatggcttacgaacggggcggagatttcctggaagatgccaggaagatacttaacagggaagtgagagggccgcggcaaagccgtttttccataggctccgcccccctgacaagcatcacgaaatctgacgctcaaatcagtggtggcgaaacccgacaggactataaagataccaggcgtttccccctggcggctccctcgtgcgctctcctgttcctgcctttcggtttaccggtgtcattccgctgttatggccgcgtttgtctcattccacgcctgacactcagttccgggtaggcagttcgctccaagctggactgtatgcacgaaccccccgttcagtccgaccgctgcgccttatccggtaactatcgtcttgagtccaacccggaaagacatgcaaaagcaccactggcagcagccactggtaattgatttagaggagttagtcttgaagtcatgcgccggttaaggctaaactgaaaggacaagttttggtgactgcgctcctccaagccagttacctcggttcaaagagttggtagctcagagaaccttcgaaaaaccgccctgcaaggcggttttttcgttttcagagcaagagattacgcgcagaccaaaacgatctcaagaagatcatcttattaatcagataaaatatttctagatttcagtgcaatttatctcttcaaatgtagcacctgaagtcagccccatacgatataagttgtaattctcatgttagtcatgccccgcgcccaccggaaggagctgactgggttgaaggctctcaagggcatcggtcgagatcccggtgcctaatgagtgagctaacttacattaattgcgttgcgca

SEQ ID NO: 911 - DNA, 4120 bp, Synthetic construct
  source 1..4120: mol_type = other DNA
acacgatataaaaccatctcattgcttgctgggttaactgagttgctgaatttttttctagaatttcgcaaaatttaataggtaaaccttgtttttttaaatttacgatgatataaaaataatgccctaaacaaaggtttaggggtattgtacaggttgtcaagcctcccacaggtcttggtgaaaccaatcactgtgacgacggtaagcaacacttggatgatattcataattgactccacgctactgattacaattacattatacagcatatctaacatttgcggcgaggttcacaatttgtatttaggtactgattgtggatgagaaggttggagaaagaccacttggttaagccggaggatgtgtcctagaattgtcgctattctgtcatcctccggttttgctaatttcattcagggaatataatgaataatgatgattacccatggttcagaaaacgtggttatttgcatttcgatgaacctgtttcattaaaaaaagcggttaaatatgtttcctctccagaaaaaataataaaacattcttttctgccatttttaagctttgaagtaaaatcgtttaaaatcaaaaaagacaaatcaacaaaacaattaagtaaaactgaaaaattaagacctattgcctattcctcacatttggatagtcatatttatgcattttacgcagaatatcttactggacattatgaattattgatccaagaaaacaatttacacgagaacatccttgccttcagatctttaaataaaagcaatatagaatttgccaagagagcatttgatacaattactgaaatgggtgagtgtagcgctgttgcattagatctttctggtttttttgacaatttagatcatcaaattttgaaacaccagtggtgcaaagttattgggactgaagcgttgccgcaagaccattttgccatatacaaaagtataacaagatattctaaagttgataaaaatagagcgtatgagattttaggtatatcaaagaataaccccaagtataatagacgcaagatctgcacccctgttgattttagaaataagattagaaaaaatggtcttattatagttaataattcccaaaaaggtataccccaaggctcgccaattagtgctctactttcaaatatatatatgcttgactttgatattgaaatgagagattacgcgcaggaacgtggtggccattattatcgctattgtgatgatatgctattcattgtaccaactaagtataataaaactctagcaggtgatgtagcccagcggattaagcatcttaaggtagaactcaatactaagaaaactgagattcgagattttatatacaaagacagtaccttagtggcaaatatgcctttacagtatcttgggtttatttttgatgggagtaatatattattacgttcatcttctctcgcaagatattcggaacgaatgaaaagaggtgtccgcttagcaaaagctacaatggacagcaagaataggattagagaaaataaaggtgaagctttaaaagctttatttaagaaaaaattatatgccagatattcacatattggaagaaggaattttttgacttatggttatcgcgccgcgaagatcatgaattcgaaagctataaaaagacagttaaaaccattgcagaaaagattggaaaatgaaatactaaaataaatatttgctggcccgaatcatacagggccacaatacagttgaaaacaagctataataaacaacatctaatttttatataccgcaataactagcataaccccttggggcctctaaacgggtcttgaggggttttttgctgaaacctcaggcatttgagaagcacacggtcacactgcttccggtagtcaataaaccggtaaaccagcaatagacataagcggctatttaacgaccctgccctgaaccgacgaccgggtcgaatttgctttcgaatttctgccattcatccgcttattatcacttattcaggcgtagcaccaggcgtttaagggcaccaataactgccttaaaaaaattacgccccgccctgccactcatcgcaatactgttgtaattcatttaacattctgccgacatggaagccatcacagacggcatgatgaacctgaatcgccagcggcatcagcaccttgtcgccttgcgtataatatttgcccatagtgaaaacgggggcgaagaagttgtccatattggccacgtttaaatcaaaactggtgaaactcacccagggattggctgagacgaaaaacatattctcaataaaccctttagggaaataggccaggttttcaccgtaacacgccacatcttgcgaatatatgtgtagaaactgccggaaatcgtcgtggtattcactccagagcgatgaaaacgtttcagtttgctcatggaaaacggtgtaacaagggtgaacactatcccatatcaccagctcaccgtctttcatcgccatacggaactctggatgagcattcatcaggcgggcaagaatgtgaataaaggccggataaaacttgtgcttatttttctttacggtctttaaaaaggccgtaatatccagctgaacggtctggttataggtacattgagcaactgactgaaatgcctcaaaatgttctttacgatgccattgggatatatcaacggtggtatatccagtgatttttttctccattttagcttccttagctcctgaaaatctcgataactcaaaaaatacgcccggtagtgatcttatttcattatggtgaaagttggaacctcttacgtgccgatcaacgtctcattttcgccaaaagttggcccagggcttcccggtatcaacagggacaccaggatttatttattctgcgaagtgatcttccgtcacaggtatttattcggcgcaaagtgcgtcgggtgatgctgccaacttactgatttagtgtatgatggtgtttttgaggtgctccagtggcttctgtttctatcagctgtccctcctgttcagctactgacggggtggtgcgtaacggcaaaagcaccgccggacatcagcgctagcggagtgtatactggcttactatgttggcactgatgagggtgtcagtgaagtgcttcatgtggcaggagaaaaaaggctgcaccggtgcgtcagcagaatatgtgatacaggatatattccgcttcctcgctcactgactcgctacgctcggtcgttcgactgcggcgagcggaaatggcttacgaacggggcggagatttcctggaagatgccaggaagatacttaacagggaagtgagagggccgcggcaaagccgtttttccataggctccgcccccctgacaagcatcacgaaatctgacgctcaaatcagtggtggcgaaacccgacaggactataaagataccaggcgtttccccctggcggctccctcgtgcgctctcctgttcctgcctttcggtttaccggtgtcattccgctgttatggccgcgtttgtctcattccacgcctgacactcagttccgggtaggcagttcgctccaagctggactgtatgcacgaaccccccgttcagtccgaccgctgcgccttatccggtaactatcgtcttgagtccaacccggaaagacatgcaaaagcaccactggcagcagccactggtaattgatttagaggagttagtcttgaagtcatgcgccggttaaggctaaactgaaaggacaagttttggtgactgcgctcctccaagccagttacctcggttcaaagagttggtagctcagagaaccttcgaaaaaccgccctgcaaggcggttttttcgttttcagagcaagagattacgcgcagaccaaaacgatctcaagaagatcatcttattaatcagataaaatatttctagatttcagtgcaatttatctcttcaaatgtagcacctgaagtcagccccatacgatataagttgtaattctcatgttagtcatgccccgcgcccaccggaaggagctgactgggttgaaggctctcaagggcatcggtcgagatcccggtgcctaatgagtgagctaacttacattaattgcgttgcgca

SEQ ID NO: 912 - DNA, 4121 bp, Synthetic construct
  source 1..4121: mol_type = other DNA
acacgatataaaaccatctcattgcttgctgggttaactgagttgctgaatttttttctagaatttcgcaaaatttaataggtaaaccttgtttttttaaatttacgatgatataaaaataatgccctaaacaaaggtttaggggtattgtacaggttgtcaagcctcccacaggtcttggtgaaaccaatcactgtgacgacggtaagcaacacttggatgatattcataattgactccacgctactgattacaaattacattatacagcatatctaacatttgcggcgaggttcacaatttgtatttaggtactgattgtggatgagaaggttggagaaagaccacttggttaagccggaggatgtgtcctagaattgtcgctattctgtcatcctccggttttgctaatttcattcagggaatataatgaataatgatgattacccatggttcagaaaacgtggttatttgcatttcgatgaacctgtttcattaaaaaaagcggttaaatatgtttcctctccagaaaaaataataaaacattcttttctgccatttttaagctttgaagtaaaatcgtttaaaatcaaaaaagacaaatcaacaaaacaattaagtaaaactgaaaaattaagacctattgcctattcctcacatttggatagtcatatttatgcattttacgcagaatatcttactggacattatgaattattgatccaagaaaacaatttacacgagaacatccttgccttcagatctttaaataaaagcaatatagaatttgccaagagagcatttgatacaattactgaaatgggtgagtgtagcgctgttgcattagatctttctggtttttttgacaatttagatcatcaaattttgaaacaccagtggtgcaaagttattgggactgaagcgttgccgcaagaccattttgccatatacaaaagtataacaagatattctaaagttgataaaaatagagcgtatgagattttaggtatatcaaagaataaccccaagtataatagacgcaagatctgcacccctgttgattttagaaataagattagaaaaaatggtcttattatagttaataattcccaaaaaggtataccccaaggctcgccaattagtgctctactttcaaatatatatatgcttgactttgatattgaaatgagagattacgcgcaggaacgtggtggccattattatcgctattgtgatgatatgctattcattgtaccaactaagtataataaaactctagcaggtgatgtagcccagcggattaagcatcttaaggtagaactcaatactaagaaaactgagattcgagattttatatacaaagacagtaccttagtggcaaatatgcctttacagtatcttgggtttatttttgatgggagtaatatattattacgttcatcttctctcgcaagatattcggaacgaatgaaaagaggtgtccgcttagcaaaagctacaatggacagcaagaataggattagagaaaataaaggtgaagctttaaaagctttatttaagaaaaaattatatgccagatattcacatattggaagaaggaattttttgacttatggttatcgcgccgcgaagatcatgaattcgaaagctataaaaagacagttaaaaccattgcagaaaagattggaaaatgaaatactaaaataaatatttgctggcccgaatcatacagggccacaatacagttgaaaacaagctataataaacaacatctaatttttatataccgcaataactagcataaccccttggggcctctaaacgggtcttgaggggttttttgctgaaacctcaggcatttgagaagcacacggtcacactgcttccggtagtcaataaaccggtaaaccagcaatagacataagcggctatttaacgaccctgccctgaaccgacgaccgggtcgaatttgctttcgaatttctgccattcatccgcttattatcacttattcaggcgtagcaccaggcgtttaagggcaccaataactgccttaaaaaaattacgccccgccctgccactcatcgcaatactgttgtaattcatttaacattctgccgacatggaagccatcacagacggcatgatgaacctgaatcgccagcggcatcagcaccttgtcgccttgcgtataatatttgcccatagtgaaaacgggggcgaagaagttgtccatattggccacgtttaaatcaaaactggtgaaactcacccagggattggctgagacgaaaaacatattctcaataaaccctttagggaaataggccaggttttcaccgtaacacgccacatcttgcgaatatatgtgtagaaactgccggaaatcgtcgtggtattcactccagagcgatgaaaacgtttcagtttgctcatggaaaacggtgtaacaagggtgaacactatcccatatcaccagctcaccgtctttcatcgccatacggaactctggatgagcattcatcaggcgggcaagaatgtgaataaaggccggataaaacttgtgcttatttttctttacggtctttaaaaaggccgtaatatccagctgaacggtctggttataggtacattgagcaactgactgaaatgcctcaaaatgttctttacgatgccattgggatatatcaacggtggtatatccagtgatttttttctccattttagcttccttagctcctgaaaatctcgataactcaaaaaatacgcccggtagtgatcttatttcattatggtgaaagttggaacctcttacgtgccgatcaacgtctcattttcgccaaaagttggcccagggcttcccggtatcaacagggacaccaggatttatttattctgcgaagtgatcttccgtcacaggtatttattcggcgcaaagtgcgtcgggtgatgctgccaacttactgatttagtgtatgatggtgtttttgaggtgctccagtggcttctgtttctatcagctgtccctcctgttcagctactgacggggtggtgcgtaacggcaaaagcaccgccggacatcagcgctagcggagtgtatactggcttactatgttggcactgatgagggtgtcagtgaagtgcttcatgtggcaggagaaaaaaggctgcaccggtgcgtcagcagaatatgtgatacaggatatattccgcttcctcgctcactgactcgctacgctcggtcgttcgactgcggcgagcggaaatggcttacgaacggggcggagatttcctggaagatgccaggaagatacttaacagggaagtgagagggccgcggcaaagccgtttttccataggctccgcccccctgacaagcatcacgaaatctgacgctcaaatcagtggtggcgaaacccgacaggactataaagataccaggcgtttccccctggcggctccctcgtgcgctctcctgttcctgcctttcggtttaccggtgtcattccgctgttatggccgcgtttgtctcattccacgcctgacactcagttccgggtaggcagttcgctccaagctggactgtatgcacgaaccccccgttcagtccgaccgctgcgccttatccggtaactatcgtcttgagtccaacccggaaagacatgcaaaagcaccactggcagcagccactggtaattgatttagaggagttagtcttgaagtcatgcgccggttaaggctaaactgaaaggacaagttttggtgactgcgctcctccaagccagttacctcggttcaaagagttggtagctcagagaaccttcgaaaaaccgccctgcaaggcggttttttcgttttcagagcaagagattacgcgcagaccaaaacgatctcaagaagatcatcttattaatcagataaaatatttctagatttcagtgcaatttatctcttcaaatgtagcacctgaagtcagccccatacgatataagttgtaattctcatgttagtcatgccccgcgcccaccggaaggagctgactgggttgaaggctctcaagggcatcggtcgagatcccggtgcctaatgagtgagctaacttacattaattgcgttgcgca

SEQ ID NO: 913 - DNA, 4122 bp, Synthetic construct
  source 1..4122: mol_type = other DNA
acacgatataaaaccatctcattgcttgctgggttaactgagttgctgaatttttttctagaatttcgcaaaatttaataggtaaaccttgtttttttaaatttacgatgatataaaaataatgccctaaacaaaggtttaggggtattgtacaggttgtcaagcctcccacaggtcttggtgaaaccaatcactgtgacgacggtaagcaacacttggatgatattcataattgactccacgctactgattacgaaattacattatacagcatatctaacatttgcggcgaggttcacaatttgtatttaggtactgattgtggatgagaaggttggagaaagaccacttggttaagccggaggatgtgtcctagaattgtcgctattctgtcatcctccggttttgctaatttcattcagggaatataatgaataatgatgattacccatggttcagaaaacgtggttatttgcatttcgatgaacctgtttcattaaaaaaagcggttaaatatgtttcctctccagaaaaaataataaaacattcttttctgccatttttaagctttgaagtaaaatcgtttaaaatcaaaaaagacaaatcaacaaaacaattaagtaaaactgaaaaattaagacctattgcctattcctcacatttggatagtcatatttatgcattttacgcagaatatcttactggacattatgaattattgatccaagaaaacaatttacacgagaacatccttgccttcagatctttaaataaaagcaatatagaatttgccaagagagcatttgatacaattactgaaatgggtgagtgtagcgctgttgcattagatctttctggtttttttgacaatttagatcatcaaattttgaaacaccagtggtgcaaagttattgggactgaagcgttgccgcaagaccattttgccatatacaaaagtataacaagatattctaaagttgataaaaatagagcgtatgagattttaggtatatcaaagaataaccccaagtataatagacgcaagatctgcacccctgttgattttagaaataagattagaaaaaatggtcttattatagttaataattcccaaaaaggtataccccaaggctcgccaattagtgctctactttcaaatatatatatgcttgactttgatattgaaatgagagattacgcgcaggaacgtggtggccattattatcgctattgtgatgatatgctattcattgtaccaactaagtataataaaactctagcaggtgatgtagcccagcggattaagcatcttaaggtagaactcaatactaagaaaactgagattcgagattttatatacaaagacagtaccttagtggcaaatatgcctttacagtatcttgggtttatttttgatgggagtaatatattattacgttcatcttctctcgcaagatattcggaacgaatgaaaagaggtgtccgcttagcaaaagctacaatggacagcaagaataggattagagaaaataaaggtgaagctttaaaagctttatttaagaaaaaattatatgccagatattcacatattggaagaaggaattttttgacttatggttatcgcgccgcgaagatcatgaattcgaaagctataaaaagacagttaaaaccattgcagaaaagattggaaaatgaaatactaaaataaatatttgctggcccgaatcatacagggccacaatacagttgaaaacaagctataataaacaacatctaatttttatataccgcaataactagcataaccccttggggcctctaaacgggtcttgaggggttttttgctgaaacctcaggcatttgagaagcacacggtcacactgcttccggtagtcaataaaccggtaaaccagcaatagacataagcggctatttaacgaccctgccctgaaccgacgaccgggtcgaatttgctttcgaatttctgccattcatccgcttattatcacttattcaggcgtagcaccaggcgtttaagggcaccaataactgccttaaaaaaattacgccccgccctgccactcatcgcaatactgttgtaattcatttaacattctgccgacatggaagccatcacagacggcatgatgaacctgaatcgccagcggcatcagcaccttgtcgccttgcgtataatatttgcccatagtgaaaacgggggcgaagaagttgtccatattggccacgtttaaatcaaaactggtgaaactcacccagggattggctgagacgaaaaacatattctcaataaaccctttagggaaataggccaggttttcaccgtaacacgccacatcttgcgaatatatgtgtagaaactgccggaaatcgtcgtggtattcactccagagcgatgaaaacgtttcagtttgctcatggaaaacggtgtaacaagggtgaacactatcccatatcaccagctcaccgtctttcatcgccatacggaactctggatgagcattcatcaggcgggcaagaatgtgaataaaggccggataaaacttgtgcttatttttctttacggtctttaaaaaggccgtaatatccagctgaacggtctggttataggtacattgagcaactgactgaaatgcctcaaaatgttctttacgatgccattgggatatatcaacggtggtatatccagtgatttttttctccattttagcttccttagctcctgaaaatctcgataactcaaaaaatacgcccggtagtgatcttatttcattatggtgaaagttggaacctcttacgtgccgatcaacgtctcattttcgccaaaagttggcccagggcttcccggtatcaacagggacaccaggatttatttattctgcgaagtgatcttccgtcacaggtatttattcggcgcaaagtgcgtcgggtgatgctgccaacttactgatttagtgtatgatggtgtttttgaggtgctccagtggcttctgtttctatcagctgtccctcctgttcagctactgacggggtggtgcgtaacggcaaaagcaccgccggacatcagcgctagcggagtgtatactggcttactatgttggcactgatgagggtgtcagtgaagtgcttcatgtggcaggagaaaaaaggctgcaccggtgcgtcagcagaatatgtgatacaggatatattccgcttcctcgctcactgactcgctacgctcggtcgttcgactgcggcgagcggaaatggcttacgaacggggcggagatttcctggaagatgccaggaagatacttaacagggaagtgagagggccgcggcaaagccgtttttccataggctccgcccccctgacaagcatcacgaaatctgacgctcaaatcagtggtggcgaaacccgacaggactataaagataccaggcgtttccccctggcggctccctcgtgcgctctcctgttcctgcctttcggtttaccggtgtcattccgctgttatggccgcgtttgtctcattccacgcctgacactcagttccgggtaggcagttcgctccaagctggactgtatgcacgaaccccccgttcagtccgaccgctgcgccttatccggtaactatcgtcttgagtccaacccggaaagacatgcaaaagcaccactggcagcagccactggtaattgatttagaggagttagtcttgaagtcatgcgccggttaaggctaaactgaaaggacaagttttggtgactgcgctcctccaagccagttacctcggttcaaagagttggtagctcagagaaccttcgaaaaaccgccctgcaaggcggttttttcgttttcagagcaagagattacgcgcagaccaaaacgatctcaagaagatcatcttattaatcagataaaatatttctagatttcagtgcaatttatctcttcaaatgtagcacctgaagtcagccccatacgatataagttgtaattctcatgttagtcatgccccgcgcccaccggaaggagctgactgggttgaaggctctcaagggcatcggtcgagatcccggtgcctaatgagtgagctaacttacattaattgcgttgcgca

SEQ ID NO: 914 - DNA, 4123 bp, Synthetic construct
  source 1..4123: mol_type = other DNA
acacgatataaaaccatctcattgcttgctgggttaactgagttgctgaatttttttctagaatttcgcaaaatttaataggtaaaccttgtttttttaaatttacgatgatataaaaataatgccctaaacaaaggtttaggggtattgtacaggttgtcaagcctcccacaggtcttggtgaaaccaatcactgtgacgacggtaagcaacacttggatgatattcataattgactccacgctactgattactgaaattacattatacagcatatctaacatttgcggcgaggttcacaatttgtatttaggtactgattgtggatgagaaggttggagaaagaccacttggttaagccggaggatgtgtcctagaattgtcgctattctgtcatcctccggttttgctaatttcattcagggaatataatgaataatgatgattacccatggttcagaaaacgtggttatttgcatttcgatgaacctgtttcattaaaaaaagcggttaaatatgtttcctctccagaaaaaataataaaacattcttttctgccatttttaagctttgaagtaaaatcgtttaaaatcaaaaaagacaaatcaacaaaacaattaagtaaaactgaaaaattaagacctattgcctattcctcacatttggatagtcatatttatgcattttacgcagaatatcttactggacattatgaattattgatccaagaaaacaatttacacgagaacatccttgccttcagatctttaaataaaagcaatatagaatttgccaagagagcatttgatacaattactgaaatgggtgagtgtagcgctgttgcattagatctttctggtttttttgacaatttagatcatcaaattttgaaacaccagtggtgcaaagttattgggactgaagcgttgccgcaagaccattttgccatatacaaaagtataacaagatattctaaagttgataaaaatagagcgtatgagattttaggtatatcaaagaataaccccaagtataatagacgcaagatctgcacccctgttgattttagaaataagattagaaaaaatggtcttattatagttaataattcccaaaaaggtataccccaaggctcgccaattagtgctctactttcaaatatatatatgcttgactttgatattgaaatgagagattacgcgcaggaacgtggtggccattattatcgctattgtgatgatatgctattcattgtaccaactaagtataataaaactctagcaggtgatgtagcccagcggattaagcatcttaaggtagaactcaatactaagaaaactgagattcgagattttatatacaaagacagtaccttagtggcaaatatgcctttacagtatcttgggtttatttttgatgggagtaatatattattacgttcatcttctctcgcaagatattcggaacgaatgaaaagaggtgtccgcttagcaaaagctacaatggacagcaagaataggattagagaaaataaaggtgaagctttaaaagctttatttaagaaaaaattatatgccagatattcacatattggaagaaggaattttttgacttatggttatcgcgccgcgaagatcatgaattcgaaagctataaaaagacagttaaaaccattgcagaaaagattggaaaatgaaatactaaaataaatatttgctggcccgaatcatacagggccacaatacagttgaaaacaagctataataaacaacatctaatttttatataccgcaataactagcataaccccttggggcctctaaacgggtcttgaggggttttttgctgaaacctcaggcatttgagaagcacacggtcacactgcttccggtagtcaataaaccggtaaaccagcaatagacataagcggctatttaacgaccctgccctgaaccgacgaccgggtcgaatttgctttcgaatttctgccattcatccgcttattatcacttattcaggcgtagcaccaggcgtttaagggcaccaataactgccttaaaaaaattacgccccgccctgccactcatcgcaatactgttgtaattcatttaacattctgccgacatggaagccatcacagacggcatgatgaacctgaatcgccagcggcatcagcaccttgtcgccttgcgtataatatttgcccatagtgaaaacgggggcgaagaagttgtccatattggccacgtttaaatcaaaactggtgaaactcacccagggattggctgagacgaaaaacatattctcaataaaccctttagggaaataggccaggttttcaccgtaacacgccacatcttgcgaatatatgtgtagaaactgccggaaatcgtcgtggtattcactccagagcgatgaaaacgtttcagtttgctcatggaaaacggtgtaacaagggtgaacactatcccatatcaccagctcaccgtctttcatcgccatacggaactctggatgagcattcatcaggcgggcaagaatgtgaataaaggccggataaaacttgtgcttatttttctttacggtctttaaaaaggccgtaatatccagctgaacggtctggttataggtacattgagcaactgactgaaatgcctcaaaatgttctttacgatgccattgggatatatcaacggtggtatatccagtgatttttttctccattttagcttccttagctcctgaaaatctcgataactcaaaaaatacgcccggtagtgatcttatttcattatggtgaaagttggaacctcttacgtgccgatcaacgtctcattttcgccaaaagttggcccagggcttcccggtatcaacagggacaccaggatttatttattctgcgaagtgatcttccgtcacaggtatttattcggcgcaaagtgcgtcgggtgatgctgccaacttactgatttagtgtatgatggtgtttttgaggtgctccagtggcttctgtttctatcagctgtccctcctgttcagctactgacggggtggtgcgtaacggcaaaagcaccgccggacatcagcgctagcggagtgtatactggcttactatgttggcactgatgagggtgtcagtgaagtgcttcatgtggcaggagaaaaaaggctgcaccggtgcgtcagcagaatatgtgatacaggatatattccgcttcctcgctcactgactcgctacgctcggtcgttcgactgcggcgagcggaaatggcttacgaacggggcggagatttcctggaagatgccaggaagatacttaacagggaagtgagagggccgcggcaaagccgtttttccataggctccgcccccctgacaagcatcacgaaatctgacgctcaaatcagtggtggcgaaacccgacaggactataaagataccaggcgtttccccctggcggctccctcgtgcgctctcctgttcctgcctttcggtttaccggtgtcattccgctgttatggccgcgtttgtctcattccacgcctgacactcagttccgggtaggcagttcgctccaagctggactgtatgcacgaaccccccgttcagtccgaccgctgcgccttatccggtaactatcgtcttgagtccaacccggaaagacatgcaaaagcaccactggcagcagccactggtaattgatttagaggagttagtcttgaagtcatgcgccggttaaggctaaactgaaaggacaagttttggtgactgcgctcctccaagccagttacctcggttcaaagagttggtagctcagagaaccttcgaaaaaccgccctgcaaggcggttttttcgttttcagagcaagagattacgcgcagaccaaaacgatctcaagaagatcatcttattaatcagataaaatatttctagatttcagtgcaatttatctcttcaaatgtagcacctgaagtcagccccatacgatataagttgtaattctcatgttagtcatgccccgcgcccaccggaaggagctgactgggttgaaggctctcaagggcatcggtcgagatcccggtgcctaatgagtgagctaacttacattaattgcgttgcgca

SEQ ID NO: 915 - DNA, 4114 bp, Synthetic construct
  source 1..4114: mol_type = other DNA
acacgatataaaaccatctcattgcttgctgggttaactgagttgctgaatttttttctagaatttcgcaaaatttaataggtaaaccttgtttttttaaatttacgatgatataaaaataatgccctaaacaaaggtttaggggtattgtacaggttgtcaagcctcccacaggtcttggtgaaaccaatcactgtgacgacggtaagcaacacttggatgatattcacaattgactccacgctactgattacattatacagcatatctaacatttgcggcgaggttcacaatttgtatttaggtactgattgtggatgagaaggttggagaaagaccacttggttaagccggaggatgtgtcctagaattgtcgctattctgtcatcctccggttttgctaatttcattcagggaatataatgaataatgatgattacccatggttcagaaaacgtggttatttgcatttcgatgaacctgtttcattaaaaaaagcggttaaatatgtttcctctccagaaaaaataataaaacattcttttctgccatttttaagctttgaagtaaaatcgtttaaaatcaaaaaagacaaatcaacaaaacaattaagtaaaactgaaaaattaagacctattgcctattcctcacatttggatagtcatatttatgcattttacgcagaatatcttactggacattatgaattattgatccaagaaaacaatttacacgagaacatccttgccttcagatctttaaataaaagcaatatagaatttgccaagagagcatttgatacaattactgaaatgggtgagtgtagcgctgttgcattagatctttctggtttttttgacaatttagatcatcaaattttgaaacaccagtggtgcaaagttattgggactgaagcgttgccgcaagaccattttgccatatacaaaagtataacaagatattctaaagttgataaaaatagagcgtatgagattttaggtatatcaaagaataaccccaagtataatagacgcaagatctgcacccctgttgattttagaaataagattagaaaaaatggtcttattatagttaataattcccaaaaaggtataccccaaggctcgccaattagtgctctactttcaaatatatatatgcttgactttgatattgaaatgagagattacgcgcaggaacgtggtggccattattatcgctattgtgatgatatgctattcattgtaccaactaagtataataaaactctagcaggtgatgtagcccagcggattaagcatcttaaggtagaactcaatactaagaaaactgagattcgagattttatatacaaagacagtaccttagtggcaaatatgcctttacagtatcttgggtttatttttgatgggagtaatatattattacgttcatcttctctcgcaagatattcggaacgaatgaaaagaggtgtccgcttagcaaaagctacaatggacagcaagaataggattagagaaaataaaggtgaagctttaaaagctttatttaagaaaaaattatatgccagatattcacatattggaagaaggaattttttgacttatggttatcgcgccgcgaagatcatgaattcgaaagctataaaaagacagttaaaaccattgcagaaaagattggaaaatgaaatactaaaataaatatttgctggcccgaatcatacagggccacaatacagttgaaaacaagctataataaacaacatctaatttttatataccgcaataactagcataaccccttggggcctctaaacgggtcttgaggggttttttgctgaaacctcaggcatttgagaagcacacggtcacactgcttccggtagtcaataaaccggtaaaccagcaatagacataagcggctatttaacgaccctgccctgaaccgacgaccgggtcgaatttgctttcgaatttctgccattcatccgcttattatcacttattcaggcgtagcaccaggcgtttaagggcaccaataactgccttaaaaaaattacgccccgccctgccactcatcgcaatactgttgtaattcatttaacattctgccgacatggaagccatcacagacggcatgatgaacctgaatcgccagcggcatcagcaccttgtcgccttgcgtataatatttgcccatagtgaaaacgggggcgaagaagttgtccatattggccacgtttaaatcaaaactggtgaaactcacccagggattggctgagacgaaaaacatattctcaataaaccctttagggaaataggccaggttttcaccgtaacacgccacatcttgcgaatatatgtgtagaaactgccggaaatcgtcgtggtattcactccagagcgatgaaaacgtttcagtttgctcatggaaaacggtgtaacaagggtgaacactatcccatatcaccagctcaccgtctttcatcgccatacggaactctggatgagcattcatcaggcgggcaagaatgtgaataaaggccggataaaacttgtgcttatttttctttacggtctttaaaaaggccgtaatatccagctgaacggtctggttataggtacattgagcaactgactgaaatgcctcaaaatgttctttacgatgccattgggatatatcaacggtggtatatccagtgatttttttctccattttagcttccttagctcctgaaaatctcgataactcaaaaaatacgcccggtagtgatcttatttcattatggtgaaagttggaacctcttacgtgccgatcaacgtctcattttcgccaaaagttggcccagggcttcccggtatcaacagggacaccaggatttatttattctgcgaagtgatcttccgtcacaggtatttattcggcgcaaagtgcgtcgggtgatgctgccaacttactgatttagtgtatgatggtgtttttgaggtgctccagtggcttctgtttctatcagctgtccctcctgttcagctactgacggggtggtgcgtaacggcaaaagcaccgccggacatcagcgctagcggagtgtatactggcttactatgttggcactgatgagggtgtcagtgaagtgcttcatgtggcaggagaaaaaaggctgcaccggtgcgtcagcagaatatgtgatacaggatatattccgcttcctcgctcactgactcgctacgctcggtcgttcgactgcggcgagcggaaatggcttacgaacggggcggagatttcctggaagatgccaggaagatacttaacagggaagtgagagggccgcggcaaagccgtttttccataggctccgcccccctgacaagcatcacgaaatctgacgctcaaatcagtggtggcgaaacccgacaggactataaagataccaggcgtttccccctggcggctccctcgtgcgctctcctgttcctgcctttcggtttaccggtgtcattccgctgttatggccgcgtttgtctcattccacgcctgacactcagttccgggtaggcagttcgctccaagctggactgtatgcacgaaccccccgttcagtccgaccgctgcgccttatccggtaactatcgtcttgagtccaacccggaaagacatgcaaaagcaccactggcagcagccactggtaattgatttagaggagttagtcttgaagtcatgcgccggttaaggctaaactgaaaggacaagttttggtgactgcgctcctccaagccagttacctcggttcaaagagttggtagctcagagaaccttcgaaaaaccgccctgcaaggcggttttttcgttttcagagcaagagattacgcgcagaccaaaacgatctcaagaagatcatcttattaatcagataaaatatttctagatttcagtgcaatttatctcttcaaatgtagcacctgaagtcagccccatacgatataagttgtaattctcatgttagtcatgccccgcgcccaccggaaggagctgactgggttgaaggctctcaagggcatcggtcgagatcccggtgcctaatgagtgagctaacttacattaattgcgttgcgca

SEQ ID NO: 916 - DNA, 4114 bp, Synthetic construct
  source 1..4114: mol_type = other DNA
acacgatataaaaccatctcattgcttgctgggttaactgagttgctgaatttttttctagaatttcgcaaaatttaataggtaaaccttgtttttttaaatttacgatgatataaaaataatgccctaaacaaaggtttaggggtattgtacaggttgtcaagcctcccacaggtcttggtgaaaccaatcactgtgacgacggtaagcaacacttggatgatattcaaaattgactccacgctactgattacattatacagcatatctaacatttgcggcgaggttcacaatttgtatttaggtactgattgtggatgagaaggttggagaaagaccacttggttaagccggaggatgtgtcctagaattgtcgctattctgtcatcctccggttttgctaatttcattcagggaatataatgaataatgatgattacccatggttcagaaaacgtggttatttgcatttcgatgaacctgtttcattaaaaaaagcggttaaatatgtttcctctccagaaaaaataataaaacattcttttctgccatttttaagctttgaagtaaaatcgtttaaaatcaaaaaagacaaatcaacaaaacaattaagtaaaactgaaaaattaagacctattgcctattcctcacatttggatagtcatatttatgcattttacgcagaatatcttactggacattatgaattattgatccaagaaaacaatttacacgagaacatccttgccttcagatctttaaataaaagcaatatagaatttgccaagagagcatttgatacaattactgaaatgggtgagtgtagcgctgttgcattagatctttctggtttttttgacaatttagatcatcaaattttgaaacaccagtggtgcaaagttattgggactgaagcgttgccgcaagaccattttgccatatacaaaagtataacaagatattctaaagttgataaaaatagagcgtatgagattttaggtatatcaaagaataaccccaagtataatagacgcaagatctgcacccctgttgattttagaaataagattagaaaaaatggtcttattatagttaataattcccaaaaaggtataccccaaggctcgccaattagtgctctactttcaaatatatatatgcttgactttgatattgaaatgagagattacgcgcaggaacgtggtggccattattatcgctattgtgatgatatgctattcattgtaccaactaagtataataaaactctagcaggtgatgtagcccagcggattaagcatcttaaggtagaactcaatactaagaaaactgagattcgagattttatatacaaagacagtaccttagtggcaaatatgcctttacagtatcttgggtttatttttgatgggagtaatatattattacgttcatcttctctcgcaagatattcggaacgaatgaaaagaggtgtccgcttagcaaaagctacaatggacagcaagaataggattagagaaaataaaggtgaagctttaaaagctttatttaagaaaaaattatatgccagatattcacatattggaagaaggaattttttgacttatggttatcgcgccgcgaagatcatgaattcgaaagctataaaaagacagttaaaaccattgcagaaaagattggaaaatgaaatactaaaataaatatttgctggcccgaatcatacagggccacaatacagttgaaaacaagctataataaacaacatctaatttttatataccgcaataactagcataaccccttggggcctctaaacgggtcttgaggggttttttgctgaaacctcaggcatttgagaagcacacggtcacactgcttccggtagtcaataaaccggtaaaccagcaatagacataagcggctatttaacgaccctgccctgaaccgacgaccgggtcgaatttgctttcgaatttctgccattcatccgcttattatcacttattcaggcgtagcaccaggcgtttaagggcaccaataactgccttaaaaaaattacgccccgccctgccactcatcgcaatactgttgtaattcatttaacattctgccgacatggaagccatcacagacggcatgatgaacctgaatcgccagcggcatcagcaccttgtcgccttgcgtataatatttgcccatagtgaaaacgggggcgaagaagttgtccatattggccacgtttaaatcaaaactggtgaaactcacccagggattggctgagacgaaaaacatattctcaataaaccctttagggaaataggccaggttttcaccgtaacacgccacatcttgcgaatatatgtgtagaaactgccggaaatcgtcgtggtattcactccagagcgatgaaaacgtttcagtttgctcatggaaaacggtgtaacaagggtgaacactatcccatatcaccagctcaccgtctttcatcgccatacggaactctggatgagcattcatcaggcgggcaagaatgtgaataaaggccggataaaacttgtgcttatttttctttacggtctttaaaaaggccgtaatatccagctgaacggtctggttataggtacattgagcaactgactgaaatgcctcaaaatgttctttacgatgccattgggatatatcaacggtggtatatccagtgatttttttctccattttagcttccttagctcctgaaaatctcgataactcaaaaaatacgcccggtagtgatcttatttcattatggtgaaagttggaacctcttacgtgccgatcaacgtctcattttcgccaaaagttggcccagggcttcccggtatcaacagggacaccaggatttatttattctgcgaagtgatcttccgtcacaggtatttattcggcgcaaagtgcgtcgggtgatgctgccaacttactgatttagtgtatgatggtgtttttgaggtgctccagtggcttctgtttctatcagctgtccctcctgttcagctactgacggggtggtgcgtaacggcaaaagcaccgccggacatcagcgctagcggagtgtatactggcttactatgttggcactgatgagggtgtcagtgaagtgcttcatgtggcaggagaaaaaaggctgcaccggtgcgtcagcagaatatgtgatacaggatatattccgcttcctcgctcactgactcgctacgctcggtcgttcgactgcggcgagcggaaatggcttacgaacggggcggagatttcctggaagatgccaggaagatacttaacagggaagtgagagggccgcggcaaagccgtttttccataggctccgcccccctgacaagcatcacgaaatctgacgctcaaatcagtggtggcgaaacccgacaggactataaagataccaggcgtttccccctggcggctccctcgtgcgctctcctgttcctgcctttcggtttaccggtgtcattccgctgttatggccgcgtttgtctcattccacgcctgacactcagttccgggtaggcagttcgctccaagctggactgtatgcacgaaccccccgttcagtccgaccgctgcgccttatccggtaactatcgtcttgagtccaacccggaaagacatgcaaaagcaccactggcagcagccactggtaattgatttagaggagttagtcttgaagtcatgcgccggttaaggctaaactgaaaggacaagttttggtgactgcgctcctccaagccagttacctcggttcaaagagttggtagctcagagaaccttcgaaaaaccgccctgcaaggcggttttttcgttttcagagcaagagattacgcgcagaccaaaacgatctcaagaagatcatcttattaatcagataaaatatttctagatttcagtgcaatttatctcttcaaatgtagcacctgaagtcagccccatacgatataagttgtaattctcatgttagtcatgccccgcgcccaccggaaggagctgactgggttgaaggctctcaagggcatcggtcgagatcccggtgcctaatgagtgagctaacttacattaattgcgttgcgca

SEQ ID NO: 917 - DNA, 4114 bp, Synthetic construct
  source 1..4114: mol_type = other DNA
acacgatataaaaccatctcattgcttgctgggttaactgagttgctgaatttttttctagaatttcgcaaaatttaataggtaaaccttgtttttttaaatttacgatgatataaaaataatgccctaaacaaaggtttaggggtattgtacaggttgtcaagcctcccacaggtcttggtgaaaccaatcactgtgacgacggtaagcaacacttggatgatattcagaattgactccacgctactgattacattatacagcatatctaacatttgcggcgaggttcacaatttgtatttaggtactgattgtggatgagaaggttggagaaagaccacttggttaagccggaggatgtgtcctagaattgtcgctattctgtcatcctccggttttgctaatttcattcagggaatataatgaataatgatgattacccatggttcagaaaacgtggttatttgcatttcgatgaacctgtttcattaaaaaaagcggttaaatatgtttcctctccagaaaaaataataaaacattcttttctgccatttttaagctttgaagtaaaatcgtttaaaatcaaaaaagacaaatcaacaaaacaattaagtaaaactgaaaaattaagacctattgcctattcctcacatttggatagtcatatttatgcattttacgcagaatatcttactggacattatgaattattgatccaagaaaacaatttacacgagaacatccttgccttcagatctttaaataaaagcaatatagaatttgccaagagagcatttgatacaattactgaaatgggtgagtgtagcgctgttgcattagatctttctggtttttttgacaatttagatcatcaaattttgaaacaccagtggtgcaaagttattgggactgaagcgttgccgcaagaccattttgccatatacaaaagtataacaagatattctaaagttgataaaaatagagcgtatgagattttaggtatatcaaagaataaccccaagtataatagacgcaagatctgcacccctgttgattttagaaataagattagaaaaaatggtcttattatagttaataattcccaaaaaggtataccccaaggctcgccaattagtgctctactttcaaatatatatatgcttgactttgatattgaaatgagagattacgcgcaggaacgtggtggccattattatcgctattgtgatgatatgctattcattgtaccaactaagtataataaaactctagcaggtgatgtagcccagcggattaagcatcttaaggtagaactcaatactaagaaaactgagattcgagattttatatacaaagacagtaccttagtggcaaatatgcctttacagtatcttgggtttatttttgatgggagtaatatattattacgttcatcttctctcgcaagatattcggaacgaatgaaaagaggtgtccgcttagcaaaagctacaatggacagcaagaataggattagagaaaataaaggtgaagctttaaaagctttatttaagaaaaaattatatgccagatattcacatattggaagaaggaattttttgacttatggttatcgcgccgcgaagatcatgaattcgaaagctataaaaagacagttaaaaccattgcagaaaagattggaaaatgaaatactaaaataaatatttgctggcccgaatcatacagggccacaatacagttgaaaacaagctataataaacaacatctaatttttatataccgcaataactagcataaccccttggggcctctaaacgggtcttgaggggttttttgctgaaacctcaggcatttgagaagcacacggtcacactgcttccggtagtcaataaaccggtaaaccagcaatagacataagcggctatttaacgaccctgccctgaaccgacgaccgggtcgaatttgctttcgaatttctgccattcatccgcttattatcacttattcaggcgtagcaccaggcgtttaagggcaccaataactgccttaaaaaaattacgccccgccctgccactcatcgcaatactgttgtaattcatttaacattctgccgacatggaagccatcacagacggcatgatgaacctgaatcgccagcggcatcagcaccttgtcgccttgcgtataatatttgcccatagtgaaaacgggggcgaagaagttgtccatattggccacgtttaaatcaaaactggtgaaactcacccagggattggctgagacgaaaaacatattctcaataaaccctttagggaaataggccaggttttcaccgtaacacgccacatcttgcgaatatatgtgtagaaactgccggaaatcgtcgtggtattcactccagagcgatgaaaacgtttcagtttgctcatggaaaacggtgtaacaagggtgaacactatcccatatcaccagctcaccgtctttcatcgccatacggaactctggatgagcattcatcaggcgggcaagaatgtgaataaaggccggataaaacttgtgcttatttttctttacggtctttaaaaaggccgtaatatccagctgaacggtctggttataggtacattgagcaactgactgaaatgcctcaaaatgttctttacgatgccattgggatatatcaacggtggtatatccagtgatttttttctccattttagcttccttagctcctgaaaatctcgataactcaaaaaatacgcccggtagtgatcttatttcattatggtgaaagttggaacctcttacgtgccgatcaacgtctcattttcgccaaaagttggcccagggcttcccggtatcaacagggacaccaggatttatttattctgcgaagtgatcttccgtcacaggtatttattcggcgcaaagtgcgtcgggtgatgctgccaacttactgatttagtgtatgatggtgtttttgaggtgctccagtggcttctgtttctatcagctgtccctcctgttcagctactgacggggtggtgcgtaacggcaaaagcaccgccggacatcagcgctagcggagtgtatactggcttactatgttggcactgatgagggtgtcagtgaagtgcttcatgtggcaggagaaaaaaggctgcaccggtgcgtcagcagaatatgtgatacaggatatattccgcttcctcgctcactgactcgctacgctcggtcgttcgactgcggcgagcggaaatggcttacgaacggggcggagatttcctggaagatgccaggaagatacttaacagggaagtgagagggccgcggcaaagccgtttttccataggctccgcccccctgacaagcatcacgaaatctgacgctcaaatcagtggtggcgaaacccgacaggactataaagataccaggcgtttccccctggcggctccctcgtgcgctctcctgttcctgcctttcggtttaccggtgtcattccgctgttatggccgcgtttgtctcattccacgcctgacactcagttccgggtaggcagttcgctccaagctggactgtatgcacgaaccccccgttcagtccgaccgctgcgccttatccggtaactatcgtcttgagtccaacccggaaagacatgcaaaagcaccactggcagcagccactggtaattgatttagaggagttagtcttgaagtcatgcgccggttaaggctaaactgaaaggacaagttttggtgactgcgctcctccaagccagttacctcggttcaaagagttggtagctcagagaaccttcgaaaaaccgccctgcaaggcggttttttcgttttcagagcaagagattacgcgcagaccaaaacgatctcaagaagatcatcttattaatcagataaaatatttctagatttcagtgcaatttatctcttcaaatgtagcacctgaagtcagccccatacgatataagttgtaattctcatgttagtcatgccccgcgcccaccggaaggagctgactgggttgaaggctctcaagggcatcggtcgagatcccggtgcctaatgagtgagctaacttacattaattgcgttgcgca

SEQ ID NO: 918 - DNA, 4578 bp, Synthetic construct
  source 1..4578: mol_type = other DNA
gtttatattcaagtggttataatttatagaataaagaaagaataaaaaaagataaaaagaatagatcccagccctgtgtataactcactactttagtcagttccgcagtattacaaaaggatgtcgcaaacgctgtttgctcctctacaaaacagaccttaaaaccctaaaggcttaagtagcaccctcgcaagctcgggcaaatcgctgaatattccttttgtctccgaccatcaggcacctgagtcgctgtctttttcgtgacattcagttcgctgcgctcacggctctggcagtgaatgggggtaaatggcactacaggcgccttttatggattcatgcaaggaaactacccataatacaagaaaagcccgtcacgggcttctcagggcgttttatggcgggtctgctatgtggtgctatctgactttttgctgttcagcagttcctgccctctgattttccagtctgaccacttcggattatcccgtgacaggtcattcagactggctaatgcacccagtaaggcagcggtatcatcaacaggcttacccgtcttactgtccctagtgcttggattctcaccaataaaaaacgcccggcggcaaccgagcgttctgaacaaatccagatggagttctgaggtcattactggatctatcaacaggagtccaagcgagctctcgaaccccagagtcccgctcagaagaactcgtcaagaaggcgatagaaggcgatgcgctgcgaatcgggagcggcgataccgtaaagcacgaggaagcggtcagcccattcgccgccaagctcttcagcaatatcacgggtagccaacgctatgtcctgatagcggtccgccacacccagccggccacagtcgatgaatccagaaaagcggccattttccaccatgatattcggcaagcaggcatcgccatgggtcacgacgagatcctcgccgtcgggcatgcgcgccttgagcctggcgaacagttcggctggcgcgagcccctgatgctcttcgtccagatcatcctgatcgacaagaccggcttccatccgagtacgtgctcgctcgatgcgatgtttcgcttggtggtcgaatgggcaggtagccggatcaagcgtatgcagccgccgcattgcatcagccatgatggatactttctcggcaggagcaaggtgagatgacaggagatcctgccccggcacttcgcccaatagcagccagtcccttcccgcttcagtgacaacgtcgagcacagctgcgcaaggaacgcccgtcgtggccagccacgatagccgcgctgcctcgtcctgcagttcattcagggcaccggacaggtcggtcttgacaaaaagaaccgggcgcccctgcgctgacagccggaacacggcggcatcagagcagccgattgtctgttgtgcccagtcatagccgaatagcctctccacccaagcggccggagaacctgcgtgcaatccatcttgttcaatcatactcttcctttttcaatattattgaagcatttatcagggttattgtctcatgagcggatacatatttgaatgtatttagaaaaataaacaaataggggttccgcgcacatttccccgaaaagtgccacctgacgtctaagaaaccattattatcatgacattaacctataaaaataggcgtatcacgaggcagaatttcagataaaaaaaatccttagctttcgctaaggatgatttctggaattctaaagatctttgacagctagttatgacaacttgacggctacatcattcactttttcttcacaaccggcacggaactcgctcgggctggccccggtgcattttttaaatacccgcgagaagtagagttgatcgtcaaaaccaacattgcgaccgacggtggcgataggcatccgggtggtgctcaaaagcagcttcgcctggctgatacgttggtcctcgcgccagcttaagacgctaatccctaactgctggcggaaaagatgtgacagacgcgacggcgacaagcaaacatgctgtgcgacgctggcgatatcaaaattgctgtctgccaggtgatcgctgatgtactgacaagcctcgcgtacccgattatccatcggtggatggagcgactcgttaatcgcttccatgcgccgcagtaacaattgctcaagcagatttatcgccagcagctccgaatagcgcccttccccttgcccggcgttaatgatttgcccaaacaggtcgctgaaatgcggctggtgcgcttcatccgggcgaaagaaccccgtattggcaaatattgacggccagttaagccattcatgccagtaggcgcgcggacgaaagtaaacccactggtgataccattcgcgagcctccggatgacgaccgtagtgatgaatctctcctggcgggaacagcaaaatatcacccggtcggcaaacaaattctcgtccctgatttttcaccaccccctgaccgcgaatggtgagattgagaatataacctttcattcccagcggtcggtcgataaaaaaatcgagataaccgttggcctcaatcggcgttaaacccgccaccagatgggcattaaacgagtatcccggcagcaggggatcattttgcgcttcagccatacttttcatactcccgccattcagagaagaaaccaattgtccatattgcatcagacattgccgtcactgcgtcttttactggctcttctcgctaaccaaaccggtaaccccgcttattaaaagcattctgtaacaaagcgggaccaaagccatgacaaaaacgcgtaacaaaagtgtctataatcacggcagaaaagtccacattgattatttgcacggcgtcacactttgctatgccatagcatttttatccataagattagcggatcctacctgacgctttttatcgcaactctctactgtttctccatacccgttttttgggctaacaggaggaattaacgatatcggtgataccagcatcgtcttgatgcccttggcagcaccctgctaaggaggtaacaacaagtaactaggtataatactagctgagaccagtgactactggtctcagttttagagctagaaatagcaagttaaaataaggctagtccgttatcaacttgaaaaagtggcaccgagtcggtgctttttttataaaacgaaaggctcagtcgaaagactgggcctttcgttttatccgaatacgggttcttgcatgttacattgtcgatctgttcatggtgaacagctttaaatgcaccaaaaactcgtaaaagctctgatgtatctatcttttttacaccgttttcatctgtgcatatggacagttttccctttgatatctaacggtgaacagttgttctacttttgtttgttagtcttgatgcttcactgatagatacaagagccataagaacctcagatccttccgtatttagccagtatgttctctagtgtggttcgttgtttttgcgtgagccatgagaacgaaccattgagatcatgcttactttgcatgtcactcaaaaattttgcctcaaaactggtgagctgaatttttgcagttaaagcatcgtgtagtgtttttcttagtccgttacgtaggtaggaatctgatgtaatggttgttggtattttgtcaccattcatttttatctggttgttctcaagttcggttacgagatccatttgtctatctagttcaacttggaaaatcaacgtatcagtcgggcggcctcgcttatcaaccaccaatttcatattgctgtaagtgtttaaatctttacttattggtttcaaaacccattggttaagccttttaaactcatggtagttattttcaagcattaacatgaacttaaattcatcaaggctaatctctatatttgccttgtgagttttcttttgtgttagttcttttaataaccactcataaatcctcatagagtatttgttttcaaaagacttaacatgttccagattatattttatgaatttttttaactggaaaagataaggcaatatctcttcactaaaaactaattctaatttttcgcttgagaacttggcatagtttgtccactggaaaatctcaaagcctttaaccaaaggattcctgatttccacagttctcgtcatcagctctctggttgctttagctaatacaccataagcattttccctactgatgttcatcatctgagcgtattggttataagtgaacgataccgtccgttctttccttgtagggttttcaatcgtggggttgagtagtgccacacagcataaaattagcttggtttcatgctccgttaagtcatagcgactaatcgctagttcatttgctttgaaaacaactaattcagacatacatctcaattggtctaggtgattttaatcactataccaattgagatgggctagtcaatgataattactagtccttttcccgggagatctgggtatctgtaaattctgctagacctttgctggaaaacttgtaaattctgctagaccctctgtaaattccgctagacctttgtgtgtttttttt

SEQ ID NO: 919 - DNA, 4698 bp, Synthetic construct
  source 1..4698: mol_type = other DNA
gtttatattcaagtggttataatttatagaataaagaaagaataaaaaaagataaaaagaatagatcccagccctgtgtataactcactactttagtcagttccgcagtattacaaaaggatgtcgcaaacgctgtttgctcctctacaaaacagaccttaaaaccctaaaggcttaagtagcaccctcgcaagctcgggcaaatcgctgaatattccttttgtctccgaccatcaggcacctgagtcgctgtctttttcgtgacattcagttcgctgcgctcacggctctggcagtgaatgggggtaaatggcactacaggcgccttttatggattcatgcaaggaaactacccataatacaagaaaagcccgtcacgggcttctcagggcgttttatggcgggtctgctatgtggtgctatctgactttttgctgttcagcagttcctgccctctgattttccagtctgaccacttcggattatcccgtgacaggtcattcagactggctaatgcacccagtaaggcagcggtatcatcaacaggcttacccgtcttactgtccctagtgcttggattctcaccaataaaaaacgcccggcggcaaccgagcgttctgaacaaatccagatggagttctgaggtcattactggatctatcaacaggagtccaagcgagctctcgaaccccagagtcccgctcagaagaactcgtcaagaaggcgatagaaggcgatgcgctgcgaatcgggagcggcgataccgtaaagcacgaggaagcggtcagcccattcgccgccaagctcttcagcaatatcacgggtagccaacgctatgtcctgatagcggtccgccacacccagccggccacagtcgatgaatccagaaaagcggccattttccaccatgatattcggcaagcaggcatcgccatgggtcacgacgagatcctcgccgtcgggcatgcgcgccttgagcctggcgaacagttcggctggcgcgagcccctgatgctcttcgtccagatcatcctgatcgacaagaccggcttccatccgagtacgtgctcgctcgatgcgatgtttcgcttggtggtcgaatgggcaggtagccggatcaagcgtatgcagccgccgcattgcatcagccatgatggatactttctcggcaggagcaaggtgagatgacaggagatcctgccccggcacttcgcccaatagcagccagtcccttcccgcttcagtgacaacgtcgagcacagctgcgcaaggaacgcccgtcgtggccagccacgatagccgcgctgcctcgtcctgcagttcattcagggcaccggacaggtcggtcttgacaaaaagaaccgggcgcccctgcgctgacagccggaacacggcggcatcagagcagccgattgtctgttgtgcccagtcatagccgaatagcctctccacccaagcggccggagaacctgcgtgcaatccatcttgttcaatcatactcttcctttttcaatattattgaagcatttatcagggttattgtctcatgagcggatacatatttgaatgtatttagaaaaataaacaaataggggttccgcgcacatttccccgaaaagtgccacctgacgtctaagaaaccattattatcatgacattaacctataaaaataggcgtatcacgaggcagaatttcagataaaaaaaatccttagctttcgctaaggatgatttctggaattctaaagatctttgacagctagttatgacaacttgacggctacatcattcactttttcttcacaaccggcacggaactcgctcgggctggccccggtgcattttttaaatacccgcgagaagtagagttgatcgtcaaaaccaacattgcgaccgacggtggcgataggcatccgggtggtgctcaaaagcagcttcgcctggctgatacgttggtcctcgcgccagcttaagacgctaatccctaactgctggcggaaaagatgtgacagacgcgacggcgacaagcaaacatgctgtgcgacgctggcgatatcaaaattgctgtctgccaggtgatcgctgatgtactgacaagcctcgcgtacccgattatccatcggtggatggagcgactcgttaatcgcttccatgcgccgcagtaacaattgctcaagcagatttatcgccagcagctccgaatagcgcccttccccttgcccggcgttaatgatttgcccaaacaggtcgctgaaatgcggctggtgcgcttcatccgggcgaaagaaccccgtattggcaaatattgacggccagttaagccattcatgccagtaggcgcgcggacgaaagtaaacccactggtgataccattcgcgagcctccggatgacgaccgtagtgatgaatctctcctggcgggaacagcaaaatatcacccggtcggcaaacaaattctcgtccctgatttttcaccaccccctgaccgcgaatggtgagattgagaatataacctttcattcccagcggtcggtcgataaaaaaatcgagataaccgttggcctcaatcggcgttaaacccgccaccagatgggcattaaacgagtatcccggcagcaggggatcattttgcgcttcagccatacttttcatactcccgccattcagagaagaaaccaattgtccatattgcatcagacattgccgtcactgcgtcttttactggctcttctcgctaaccaaaccggtaaccccgcttattaaaagcattctgtaacaaagcgggaccaaagccatgacaaaaacgcgtaacaaaagtgtctataatcacggcagaaaagtccacattgattatttgcacggcgtcacactttgctatgccatagcatttttatccataagattagcggatcctacctgacgctttttatcgcaactctctactgtttctccatacccgttttttgggctaacaggaggaattaacgatatcggtgataccagcatcgtcttgatgcccttggcagcaccctgctaaggaggtaacaacaagatgaatatcatccaagtgttgcttaccgtcgtcacagtgattggtttcaccaagacctgtgggaggcttgacaacctgttagatatgctgtataatgtaatcagtagcgtggagtcaatataactaggtataatactagctgagaccagtgactactggtctcagttttagagctagaaatagcaagttaaaataaggctagtccgttatcaacttgaaaaagtggcaccgagtcggtgctttttttataaaacgaaaggctcagtcgaaagactgggcctttcgttttatccgaatacgggttcttgcatgttacattgtcgatctgttcatggtgaacagctttaaatgcaccaaaaactcgtaaaagctctgatgtatctatcttttttacaccgttttcatctgtgcatatggacagttttccctttgatatctaacggtgaacagttgttctacttttgtttgttagtcttgatgcttcactgatagatacaagagccataagaacctcagatccttccgtatttagccagtatgttctctagtgtggttcgttgtttttgcgtgagccatgagaacgaaccattgagatcatgcttactttgcatgtcactcaaaaattttgcctcaaaactggtgagctgaatttttgcagttaaagcatcgtgtagtgtttttcttagtccgttacgtaggtaggaatctgatgtaatggttgttggtattttgtcaccattcatttttatctggttgttctcaagttcggttacgagatccatttgtctatctagttcaacttggaaaatcaacgtatcagtcgggcggcctcgcttatcaaccaccaatttcatattgctgtaagtgtttaaatctttacttattggtttcaaaacccattggttaagccttttaaactcatggtagttattttcaagcattaacatgaacttaaattcatcaaggctaatctctatatttgccttgtgagttttcttttgtgttagttcttttaataaccactcataaatcctcatagagtatttgttttcaaaagacttaacatgttccagattatattttatgaatttttttaactggaaaagataaggcaatatctcttcactaaaaactaattctaatttttcgcttgagaacttggcatagtttgtccactggaaaatctcaaagcctttaaccaaaggattcctgatttccacagttctcgtcatcagctctctggttgctttagctaatacaccataagcattttccctactgatgttcatcatctgagcgtattggttataagtgaacgataccgtccgttctttccttgtagggttttcaatcgtggggttgagtagtgccacacagcataaaattagcttggtttcatgctccgttaagtcatagcgactaatcgctagttcatttgctttgaaaacaactaattcagacatacatctcaattggtctaggtgattttaatcactataccaattgagatgggctagtcaatgataattactagtccttttcccgggagatctgggtatctgtaaattctgctagacctttgctggaaaacttgtaaattctgctagaccctctgtaaattccgctagacctttgtgtgtttttttt

SEQ ID NO: 920 - DNA, 4818 bp, Synthetic construct
  source 1..4818: mol_type = other DNA
gtttatattcaagtggttataatttatagaataaagaaagaataaaaaaagataaaaagaatagatcccagccctgtgtataactcactactttagtcagttccgcagtattacaaaaggatgtcgcaaacgctgtttgctcctctacaaaacagaccttaaaaccctaaaggcttaagtagcaccctcgcaagctcgggcaaatcgctgaatattccttttgtctccgaccatcaggcacctgagtcgctgtctttttcgtgacattcagttcgctgcgctcacggctctggcagtgaatgggggtaaatggcactacaggcgccttttatggattcatgcaaggaaactacccataatacaagaaaagcccgtcacgggcttctcagggcgttttatggcgggtctgctatgtggtgctatctgactttttgctgttcagcagttcctgccctctgattttccagtctgaccacttcggattatcccgtgacaggtcattcagactggctaatgcacccagtaaggcagcggtatcatcaacaggcttacccgtcttactgtccctagtgcttggattctcaccaataaaaaacgcccggcggcaaccgagcgttctgaacaaatccagatggagttctgaggtcattactggatctatcaacaggagtccaagcgagctctcgaaccccagagtcccgctcagaagaactcgtcaagaaggcgatagaaggcgatgcgctgcgaatcgggagcggcgataccgtaaagcacgaggaagcggtcagcccattcgccgccaagctcttcagcaatatcacgggtagccaacgctatgtcctgatagcggtccgccacacccagccggccacagtcgatgaatccagaaaagcggccattttccaccatgatattcggcaagcaggcatcgccatgggtcacgacgagatcctcgccgtcgggcatgcgcgccttgagcctggcgaacagttcggctggcgcgagcccctgatgctcttcgtccagatcatcctgatcgacaagaccggcttccatccgagtacgtgctcgctcgatgcgatgtttcgcttggtggtcgaatgggcaggtagccggatcaagcgtatgcagccgccgcattgcatcagccatgatggatactttctcggcaggagcaaggtgagatgacaggagatcctgccccggcacttcgcccaatagcagccagtcccttcccgcttcagtgacaacgtcgagcacagctgcgcaaggaacgcccgtcgtggccagccacgatagccgcgctgcctcgtcctgcagttcattcagggcaccggacaggtcggtcttgacaaaaagaaccgggcgcccctgcgctgacagccggaacacggcggcatcagagcagccgattgtctgttgtgcccagtcatagccgaatagcctctccacccaagcggccggagaacctgcgtgcaatccatcttgttcaatcatactcttcctttttcaatattattgaagcatttatcagggttattgtctcatgagcggatacatatttgaatgtatttagaaaaataaacaaataggggttccgcgcacatttccccgaaaagtgccacctgacgtctaagaaaccattattatcatgacattaacctataaaaataggcgtatcacgaggcagaatttcagataaaaaaaatccttagctttcgctaaggatgatttctggaattctaaagatctttgacagctagttatgacaacttgacggctacatcattcactttttcttcacaaccggcacggaactcgctcgggctggccccggtgcattttttaaatacccgcgagaagtagagttgatcgtcaaaaccaacattgcgaccgacggtggcgataggcatccgggtggtgctcaaaagcagcttcgcctggctgatacgttggtcctcgcgccagcttaagacgctaatccctaactgctggcggaaaagatgtgacagacgcgacggcgacaagcaaacatgctgtgcgacgctggcgatatcaaaattgctgtctgccaggtgatcgctgatgtactgacaagcctcgcgtacccgattatccatcggtggatggagcgactcgttaatcgcttccatgcgccgcagtaacaattgctcaagcagatttatcgccagcagctccgaatagcgcccttccccttgcccggcgttaatgatttgcccaaacaggtcgctgaaatgcggctggtgcgcttcatccgggcgaaagaaccccgtattggcaaatattgacggccagttaagccattcatgccagtaggcgcgcggacgaaagtaaacccactggtgataccattcgcgagcctccggatgacgaccgtagtgatgaatctctcctggcgggaacagcaaaatatcacccggtcggcaaacaaattctcgtccctgatttttcaccaccccctgaccgcgaatggtgagattgagaatataacctttcattcccagcggtcggtcgataaaaaaatcgagataaccgttggcctcaatcggcgttaaacccgccaccagatgggcattaaacgagtatcccggcagcaggggatcattttgcgcttcagccatacttttcatactcccgccattcagagaagaaaccaattgtccatattgcatcagacattgccgtcactgcgtcttttactggctcttctcgctaaccaaaccggtaaccccgcttattaaaagcattctgtaacaaagcgggaccaaagccatgacaaaaacgcgtaacaaaagtgtctataatcacggcagaaaagtccacattgattatttgcacggcgtcacactttgctatgccatagcatttttatccataagattagcggatcctacctgacgctttttatcgcaactctctactgtttctccatacccgttttttgggctaacaggaggaattaacgatatcggtgataccagcatcgtcttgatgcccttggcagcaccctgctaaggaggtaacaacaagatgaatatcatccaagtgttgcttaccgtcgtcacagtgattggtttcaccaagacctgtgggaggcttgacaacctgttagatatgctgtataatgtaatcagtagcgtggagtcaataatgaatattatacaagttctattaacagtagtgaccgttatcggcttcaccaagacgtgcggtcgtctggataatttgctggacatgctgtacaacgtgatctccagcgttgagagcatttaactaggtataatactagctgagaccagtgactactggtctcagttttagagctagaaatagcaagttaaaataaggctagtccgttatcaacttgaaaaagtggcaccgagtcggtgctttttttataaaacgaaaggctcagtcgaaagactgggcctttcgttttatccgaatacgggttcttgcatgttacattgtcgatctgttcatggtgaacagctttaaatgcaccaaaaactcgtaaaagctctgatgtatctatcttttttacaccgttttcatctgtgcatatggacagttttccctttgatatctaacggtgaacagttgttctacttttgtttgttagtcttgatgcttcactgatagatacaagagccataagaacctcagatccttccgtatttagccagtatgttctctagtgtggttcgttgtttttgcgtgagccatgagaacgaaccattgagatcatgcttactttgcatgtcactcaaaaattttgcctcaaaactggtgagctgaatttttgcagttaaagcatcgtgtagtgtttttcttagtccgttacgtaggtaggaatctgatgtaatggttgttggtattttgtcaccattcatttttatctggttgttctcaagttcggttacgagatccatttgtctatctagttcaacttggaaaatcaacgtatcagtcgggcggcctcgcttatcaaccaccaatttcatattgctgtaagtgtttaaatctttacttattggtttcaaaacccattggttaagccttttaaactcatggtagttattttcaagcattaacatgaacttaaattcatcaaggctaatctctatatttgccttgtgagttttcttttgtgttagttcttttaataaccactcataaatcctcatagagtatttgttttcaaaagacttaacatgttccagattatattttatgaatttttttaactggaaaagataaggcaatatctcttcactaaaaactaattctaatttttcgcttgagaacttggcatagtttgtccactggaaaatctcaaagcctttaaccaaaggattcctgatttccacagttctcgtcatcagctctctggttgctttagctaatacaccataagcattttccctactgatgttcatcatctgagcgtattggttataagtgaacgataccgtccgttctttccttgtagggttttcaatcgtggggttgagtagtgccacacagcataaaattagcttggtttcatgctccgttaagtcatagcgactaatcgctagttcatttgctttgaaaacaactaattcagacatacatctcaattggtctaggtgattttaatcactataccaattgagatgggctagtcaatgataattactagtccttttcccgggagatctgggtatctgtaaattctgctagacctttgctggaaaacttgtaaattctgctagaccctctgtaaattccgctagacctttgtgtgtttttttt

SEQ ID NO: 921 - DNA, 4939 bp, Synthetic construct
  source 1..4939: mol_type = other DNA
gtttatattcaagtggttataatttatagaataaagaaagaataaaaaaagataaaaagaatagatcccagccctgtgtataactcactactttagtcagttccgcagtattacaaaaggatgtcgcaaacgctgtttgctcctctacaaaacagaccttaaaaccctaaaggcttaagtagcaccctcgcaagctcgggcaaatcgctgaatattccttttgtctccgaccatcaggcacctgagtcgctgtctttttcgtgacattcagttcgctgcgctcacggctctggcagtgaatgggggtaaatggcactacaggcgccttttatggattcatgcaaggaaactacccataatacaagaaaagcccgtcacgggcttctcagggcgttttatggcgggtctgctatgtggtgctatctgactttttgctgttcagcagttcctgccctctgattttccagtctgaccacttcggattatcccgtgacaggtcattcagactggctaatgcacccagtaaggcagcggtatcatcaacaggcttacccgtcttactgtccctagtgcttggattctcaccaataaaaaacgcccggcggcaaccgagcgttctgaacaaatccagatggagttctgaggtcattactggatctatcaacaggagtccaagcgagctctcgaaccccagagtcccgctcagaagaactcgtcaagaaggcgatagaaggcgatgcgctgcgaatcgggagcggcgataccgtaaagcacgaggaagcggtcagcccattcgccgccaagctcttcagcaatatcacgggtagccaacgctatgtcctgatagcggtccgccacacccagccggccacagtcgatgaatccagaaaagcggccattttccaccatgatattcggcaagcaggcatcgccatgggtcacgacgagatcctcgccgtcgggcatgcgcgccttgagcctggcgaacagttcggctggcgcgagcccctgatgctcttcgtccagatcatcctgatcgacaagaccggcttccatccgagtacgtgctcgctcgatgcgatgtttcgcttggtggtcgaatgggcaggtagccggatcaagcgtatgcagccgccgcattgcatcagccatgatggatactttctcggcaggagcaaggtgagatgacaggagatcctgccccggcacttcgcccaatagcagccagtcccttcccgcttcagtgacaacgtcgagcacagctgcgcaaggaacgcccgtcgtggccagccacgatagccgcgctgcctcgtcctgcagttcattcagggcaccggacaggtcggtcttgacaaaaagaaccgggcgcccctgcgctgacagccggaacacggcggcatcagagcagccgattgtctgttgtgcccagtcatagccgaatagcctctccacccaagcggccggagaacctgcgtgcaatccatcttgttcaatcatactccttcctttttcaatattattgaagcatttatcagggttattgtctcatgagcggatacatatttgaatgtatttagaaaaataaacaaataggggttccgcgcacatttccccgaaaagtgccacctgacgtctaagaaaccattattatcatgacattaacctataaaaataggcgtatcacgaggcagaatttcagataaaaaaaatccttagctttcgctaaggatgatttctggaattctaaagatctttgacagctagttatgacaacttgacggctacatcattcactttttcttcacaaccggcacggaactcgctcgggctggccccggtgcattttttaaatacccgcgagaagtagagttgatcgtcaaaaccaacattgcgaccgacggtggcgataggcatccgggtggtgctcaaaagcagcttcgcctggctgatacgttggtcctcgcgccagcttaagacgctaatccctaactgctggcggaaaagatgtgacagacgcgacggcgacaagcaaacatgctgtgcgacgctggcgatatcaaaattgctgtctgccaggtgatcgctgatgtactgacaagcctcgcgtacccgattatccatcggtggatggagcgactcgttaatcgcttccatgcgccgcagtaacaattgctcaagcagatttatcgccagcagctccgaatagcgcccttccccttgcccggcgttaatgatttgcccaaacaggtcgctgaaatgcggctggtgcgcttcatccgggcgaaagaaccccgtattggcaaatattgacggccagttaagccattcatgccagtaggcgcgcggacgaaagtaaacccactggtgataccattcgcgagcctccggatgacgaccgtagtgatgaatctctcctggcgggaacagcaaaatatcacccggtcggcaaacaaattctcgtccctgatttttcaccaccccctgaccgcgaatggtgagattgagaatataacctttcattcccagcggtcggtcgataaaaaaatcgagataaccgttggcctcaatcggcgttaaacccgccaccagatgggcattaaacgagtatcccggcagcaggggatcattttgcgcttcagccatacttttcatactcccgccattcagagaagaaaccaattgtccatattgcatcagacattgccgtcactgcgtcttttactggctcttctcgctaaccaaaccggtaaccccgcttattaaaagcattctgtaacaaagcgggaccaaagccatgacaaaaacgcgtaacaaaagtgtctataatcacggcagaaaagtccacattgattatttgcacggcgtcacactttgctatgccatagcatttttatccataagattagcggatcctacctgacgctttttatcgcaactctctactgtttctccatacccgttttttgggctaacaggaggaattaacgatatcggtgataccagcatcgtcttgatgcccttggcagcaccctgctaaggaggtaacaacaagatgaatatcatccaagtgttgcttaccgtcgtcacagtgattggtttcaccaagacctgtgggaggcttgacaacctgttagatatgctgtataatgtaatcagtagcgtggagtcaataatgaatattatacaagttctattaacagtagtgaccgttatcggcttcaccaagacgtgcggtcgtctggataatttgctggacatgctgtacaacgtgatctccagcgttgagagcattatgaacatcatccaggtgttactgacggttgttactgttatcgggtttaccaaaacctgtggccgtttagacaaccttctggatatgctttataacgttattagttcggtagaaagcatataactaggtataatactagctgagaccagtgactactggtctcagttttagagctagaaatagcaagttaaaataaggctagtccgttatcaacttgaaaaagtggcaccgagtcggtgctttttttataaaacgaaaggctcagtcgaaagactgggcctttcgttttatccgaatacgggttcttgcatgttacattgtcgatctgttcatggtgaacagctttaaatgcaccaaaaactcgtaaaagctctgatgtatctatcttttttacaccgttttcatctgtgcatatggacagttttccctttgatatctaacggtgaacagttgttctacttttgtttgttagtcttgatgcttcactgatagatacaagagccataagaacctcagatccttccgtatttagccagtatgttctctagtgtggttcgttgtttttgcgtgagccatgagaacgaaccattgagatcatgcttactttgcatgtcactcaaaaattttgcctcaaaactggtgagctgaatttttgcagttaaagcatcgtgtagtgtttttcttagtccgttacgtaggtaggaatctgatgtaatggttgttggtattttgtcaccattcatttttatctggttgttctcaagttcggttacgagatccatttgtctatctagttcaacttggaaaatcaacgtatcagtcgggcggcctcgcttatcaaccaccaatttcatattgctgtaagtgtttaaatctttacttattggtttcaaaacccattggttaagccttttaaactcatggtagttattttcaagcattaacatgaacttaaattcatcaaggctaatctctatatttgccttgtgagttttcttttgtgttagttcttttaataaccactcataaatcctcatagagtatttgttttcaaaagacttaacatgttccagattatattttatgaatttttttaactggaaaagataaggcaatatctcttcactaaaaactaattctaatttttcgcttgagaacttggcatagtttgtccactggaaaatctcaaagcctttaaccaaaggattcctgatttccacagttctcgtcatcagctctctggttgctttagctaatacaccataagcattttccctactgatgttcatcatctgagcgtattggttataagtgaacgataccgtccgttctttccttgtagggttttcaatcgtggggttgagtagtgccacacagcataaaattagcttggtttcatgctccgttaagtcatagcgactaatcgctagttcatttgctttgaaaacaactaattcagacatacatctcaattggtctaggtgattttaatcactataccaattgagatgggctagtcaatgataattactagtccttttcccgggagatctgggtatctgtaaattctgctagacctttgctggaaaacttgtaaattctgctagaccctctgtaaattccgctagacctttgtgtgtttttttt

SEQ ID NO: 922 - DNA, 4698 bp, Synthetic construct
  source 1..4698: mol_type = other DNA
gtttatattcaagtggttataatttatagaataaagaaagaataaaaaaagataaaaagaatagatcccagccctgtgtataactcactactttagtcagttccgcagtattacaaaaggatgtcgcaaacgctgtttgctcctctacaaaacagaccttaaaaccctaaaggcttaagtagcaccctcgcaagctcgggcaaatcgctgaatattccttttgtctccgaccatcaggcacctgagtcgctgtctttttcgtgacattcagttcgctgcgctcacggctctggcagtgaatgggggtaaatggcactacaggcgccttttatggattcatgcaaggaaactacccataatacaagaaaagcccgtcacgggcttctcagggcgttttatggcgggtctgctatgtggtgctatctgactttttgctgttcagcagttcctgccctctgattttccagtctgaccacttcggattatcccgtgacaggtcattcagactggctaatgcacccagtaaggcagcggtatcatcaacaggcttacccgtcttactgtccctagtgcttggattctcaccaataaaaaacgcccggcggcaaccgagcgttctgaacaaatccagatggagttctgaggtcattactggatctatcaacaggagtccaagcgagctctcgaaccccagagtcccgctcagaagaactcgtcaagaaggcgatagaaggcgatgcgctgcgaatcgggagcggcgataccgtaaagcacgaggaagcggtcagcccattcgccgccaagctcttcagcaatatcacgggtagccaacgctatgtcctgatagcggtccgccacacccagccggccacagtcgatgaatccagaaaagcggccattttccaccatgatattcggcaagcaggcatcgccatgggtcacgacgagatcctcgccgtcgggcatgcgcgccttgagcctggcgaacagttcggctggcgcgagcccctgatgctcttcgtccagatcatcctgatcgacaagaccggcttccatccgagtacgtgctcgctcgatgcgatgtttcgcttggtggtcgaatgggcaggtagccggatcaagcgtatgcagccgccgcattgcatcagccatgatggatactttctcggcaggagcaaggtgagatgacaggagatcctgccccggcacttcgcccaatagcagccagtcccttcccgcttcagtgacaacgtcgagcacagctgcgcaaggaacgcccgtcgtggccagccacgatagccgcgctgcctcgtcctgcagttcattcagggcaccggacaggtcggtcttgacaaaaagaaccgggcgcccctgcgctgacagccggaacacggcggcatcagagcagccgattgtctgttgtgcccagtcatagccgaatagcctctccacccaagcggccggagaacctgcgtgcaatccatcttgttcaatcatactcttcctttttcaatattattgaagcatttatcagggttattgtctcatgagcggatacatatttgaatgtatttagaaaaataaacaaataggggttccgcgcacatttccccgaaaagtgccacctgacgtctaagaaaccattattatcatgacattaacctataaaaataggcgtatcacgaggcagaatttcagataaaaaaaatccttagctttcgctaaggatgatttctggaattctaaagatctttgacagctagttatgacaacttgacggctacatcattcactttttcttcacaaccggcacggaactcgctcgggctggccccggtgcattttttaaatacccgcgagaagtagagttgatcgtcaaaaccaacattgcgaccgacggtggcgataggcatccgggtggtgctcaaaagcagcttcgcctggctgatacgttggtcctcgcgccagcttaagacgctaatccctaactgctggcggaaaagatgtgacagacgcgacggcgacaagcaaacatgctgtgcgacgctggcgatatcaaaattgctgtctgccaggtgatcgctgatgtactgacaagcctcgcgtacccgattatccatcggtggatggagcgactcgttaatcgcttccatgcgccgcagtaacaattgctcaagcagatttatcgccagcagctccgaatagcgcccttccccttgcccggcgttaatgatttgcccaaacaggtcgctgaaatgcggctggtgcgcttcatccgggcgaaagaaccccgtattggcaaatattgacggccagttaagccattcatgccagtaggcgcgcggacgaaagtaaacccactggtgataccattcgcgagcctccggatgacgaccgtagtgatgaatctctcctggcgggaacagcaaaatatcacccggtcggcaaacaaattctcgtccctgatttttcaccaccccctgaccgcgaatggtgagattgagaatataacctttcattcccagcggtcggtcgataaaaaaatcgagataaccgttggcctcaatcggcgttaaacccgccaccagatgggcattaaacgagtatcccggcagcaggggatcattttgcgcttcagccatacttttcatactcccgccattcagagaagaaaccaattgtccatattgcatcagacattgccgtcactgcgtcttttactggctcttctcgctaaccaaaccggtaaccccgcttattaaaagcattctgtaacaaagcgggaccaaagccatgacaaaaacgcgtaacaaaagtgtctataatcacggcagaaaagtccacattgattatttgcacggcgtcacactttgctatgccatagcatttttatccataagattagcggatcctacctgacgctttttatcgcaactctctactgtttctccatacccgttttttgggctaacaggaggaattaacgatatcggtgataccagcatcgtcttgatgcccttggcagcaccctgctaaggaggtaacaacaagatgtcatgtttaaaaaatactctatttacacagaacgacatcgtgatcgtgttgctgattatgaatattggtgagatcgtcgtgacgtccctgcgtgttggcaccgatctgagcgtttactaactaggtataatactagctgagaccagtgactactggtctcagttttagagctagaaatagcaagttaaaataaggctagtccgttatcaacttgaaaaagtggcaccgagtcggtgctttttttataaaacgaaaggctcagtcgaaagactgggcctttcgttttatccgaatacgggttcttgcatgttacattgtcgatctgttcatggtgaacagctttaaatgcaccaaaaactcgtaaaagctctgatgtatctatcttttttacaccgttttcatctgtgcatatggacagttttccctttgatatctaacggtgaacagttgttctacttttgtttgttagtcttgatgcttcactgatagatacaagagccataagaacctcagatccttccgtatttagccagtatgttctctagtgtggttcgttgtttttgcgtgagccatgagaacgaaccattgagatcatgcttactttgcatgtcactcaaaaattttgcctcaaaactggtgagctgaatttttgcagttaaagcatcgtgtagtgtttttcttagtccgttacgtaggtaggaatctgatgtaatggttgttggtattttgtcaccattcatttttatctggttgttctcaagttcggttacgagatccatttgtctatctagttcaacttggaaaatcaacgtatcagtcgggcggcctcgcttatcaaccaccaatttcatattgctgtaagtgtttaaatctttacttattggtttcaaaacccattggttaagccttttaaactcatggtagttattttcaagcattaacatgaacttaaattcatcaaggctaatctctatatttgccttgtgagttttcttttgtgttagttcttttaataaccactcataaatcctcatagagtatttgttttcaaaagacttaacatgttccagattatattttatgaatttttttaactggaaaagataaggcaatatctcttcactaaaaactaattctaatttttcgcttgagaacttggcatagtttgtccactggaaaatctcaaagcctttaaccaaaggattcctgatttccacagttctcgtcatcagctctctggttgctttagctaatacaccataagcattttccctactgatgttcatcatctgagcgtattggttataagtgaacgataccgtccgttctttccttgtagggttttcaatcgtggggttgagtagtgccacacagcataaaattagcttggtttcatgctccgttaagtcatagcgactaatcgctagttcatttgctttgaaaacaactaattcagacatacatctcaattggtctaggtgattttaatcactataccaattgagatgggctagtcaatgataattactagtccttttcccgggagatctgggtatctgtaaattctgctagacctttgctggaaaacttgtaaattctgctagaccctctgtaaattccgctagacctttgtgtgtttttttt

SEQ ID NO: 923 - DNA, 4818 bp, Synthetic construct
  source 1..4818: mol_type = other DNA
gtttatattcaagtggttataatttatagaataaagaaagaataaaaaaagataaaaagaatagatcccagccctgtgtataactcactactttagtcagttccgcagtattacaaaaggatgtcgcaaacgctgtttgctcctctacaaaacagaccttaaaaccctaaaggcttaagtagcaccctcgcaagctcgggcaaatcgctgaatattccttttgtctccgaccatcaggcacctgagtcgctgtctttttcgtgacattcagttcgctgcgctcacggctctggcagtgaatgggggtaaatggcactacaggcgccttttatggattcatgcaaggaaactacccataatacaagaaaagcccgtcacgggcttctcagggcgttttatggcgggtctgctatgtggtgctatctgactttttgctgttcagcagttcctgccctctgattttccagtctgaccacttcggattatcccgtgacaggtcattcagactggctaatgcacccagtaaggcagcggtatcatcaacaggcttacccgtcttactgtccctagtgcttggattctcaccaataaaaaacgcccggcggcaaccgagcgttctgaacaaatccagatggagttctgaggtcattactggatctatcaacaggagtccaagcgagctctcgaaccccagagtcccgctcagaagaactcgtcaagaaggcgatagaaggcgatgcgctgcgaatcgggagcggcgataccgtaaagcacgaggaagcggtcagcccattcgccgccaagctcttcagcaatatcacgggtagccaacgctatgtcctgatagcggtccgccacacccagccggccacagtcgatgaatccagaaaagcggccattttccaccatgatattcggcaagcaggcatcgccatgggtcacgacgagatcctcgccgtcgggcatgcgcgccttgagcctggcgaacagttcggctggcgcgagcccctgatgctcttcgtccagatcatcctgatcgacaagaccggcttccatccgagtacgtgctcgctcgatgcgatgtttcgcttggtggtcgaatgggcaggtagccggatcaagcgtatgcagccgccgcattgcatcagccatgatggatactttctcggcaggagcaaggtgagatgacaggagatcctgccccggcacttcgcccaatagcagccagtcccttcccgcttcagtgacaacgtcgagcacagctgcgcaaggaacgcccgtcgtggccagccacgatagccgcgctgcctcgtcctgcagttcattcagggcaccggacaggtcggtcttgacaaaaagaaccgggcgcccctgcgctgacagccggaacacggcggcatcagagcagccgattgtctgttgtgcccagtcatagccgaatagcctctccacccaagcggccggagaacctgcgtgcaatccatcttgttcaatcatactcttcctttttcaatattattgaagcatttatcagggttattgtctcatgagcggatacatatttgaatgtatttagaaaaataaacaaataggggttccgcgcacatttccccgaaaagtgccacctgacgtctaagaaaccattattatcatgacattaacctataaaaataggcgtatcacgaggcagaatttcagataaaaaaaatccttagctttcgctaaggatgatttctggaattctaaagatctttgacagctagttatgacaacttgacggctacatcattcactttttcttcacaaccggcacggaactcgctcgggctggccccggtgcattttttaaatacccgcgagaagtagagttgatcgtcaaaaccaacattgcgaccgacggtggcgataggcatccgggtggtgctcaaaagcagcttcgcctggctgatacgttggtcctcgcgccagcttaagacgctaatccctaactgctggcggaaaagatgtgacagacgcgacggcgacaagcaaacatgctgtgcgacgctggcgatatcaaaattgctgtctgccaggtgatcgctgatgtactgacaagcctcgcgtacccgattatccatcggtggatggagcgactcgttaatcgcttccatgcgccgcagtaacaattgctcaagcagatttatcgccagcagctccgaatagcgcccttccccttgcccggcgttaatgatttgcccaaacaggtcgctgaaatgcggctggtgcgcttcatccgggcgaaagaaccccgtattggcaaatattgacggccagttaagccattcatgccagtaggcgcgcggacgaaagtaaacccactggtgataccattcgcgagcctccggatgacgaccgtagtgatgaatctctcctggcgggaacagcaaaatatcacccggtcggcaaacaaattctcgtccctgatttttcaccaccccctgaccgcgaatggtgagattgagaatataacctttcattcccagcggtcggtcgataaaaaaatcgagataaccgttggcctcaatcggcgttaaacccgccaccagatgggcattaaacgagtatcccggcagcaggggatcattttgcgcttcagccatacttttcatactcccgccattcagagaagaaaccaattgtccatattgcatcagacattgccgtcactgcgtcttttactggctcttctcgctaaccaaaccggtaaccccgcttattaaaagcattctgtaacaaagcgggaccaaagccatgacaaaaacgcgtaacaaaagtgtctataatcacggcagaaaagtccacattgattatttgcacggcgtcacactttgctatgccatagcatttttatccataagattagcggatcctacctgacgctttttatcgcaactctctactgtttctccatacccgttttttgggctaacaggaggaattaacgatatcggtgataccagcatcgtcttgatgcccttggcagcaccctgctaaggaggtaacaacaagatgtcatgtttaaaaaatactctatttacacagaacgacatcgtgatcgtgttgctgattatgaatattggtgagatcgtcgtgacgtccctgcgtgttggcaccgatctgagcgtttacatgtcatgcttgaaaaacactctttttacacaaaacgacattgtcatcgtccttcttattatgaatatcggggaaattgtagtaacgagccttcgcgtgggaaccgacttatcggtttactaactaggtataatactagctgagaccagtgactactggtctcagttttagagctagaaatagcaagttaaaataaggctagtccgttatcaacttgaaaaagtggcaccgagtcggtgctttttttataaaacgaaaggctcagtcgaaagactgggcctttcgttttatccgaatacgggttcttgcatgttacattgtcgatctgttcatggtgaacagctttaaatgcaccaaaaactcgtaaaagctctgatgtatctatcttttttacaccgttttcatctgtgcatatggacagttttccctttgatatctaacggtgaacagttgttctacttttgtttgttagtcttgatgcttcactgatagatacaagagccataagaacctcagatccttccgtatttagccagtatgttctctagtgtggttcgttgtttttgcgtgagccatgagaacgaaccattgagatcatgcttactttgcatgtcactcaaaaattttgcctcaaaactggtgagctgaatttttgcagttaaagcatcgtgtagtgtttttcttagtccgttacgtaggtaggaatctgatgtaatggttgttggtattttgtcaccattcatttttatctggttgttctcaagttcggttacgagatccatttgtctatctagttcaacttggaaaatcaacgtatcagtcgggcggcctcgcttatcaaccaccaatttcatattgctgtaagtgtttaaatctttacttattggtttcaaaacccattggttaagccttttaaactcatggtagttattttcaagcattaacatgaacttaaattcatcaaggctaatctctatatttgccttgtgagttttcttttgtgttagttcttttaataaccactcataaatcctcatagagtatttgttttcaaaagacttaacatgttccagattatattttatgaatttttttaactggaaaagataaggcaatatctcttcactaaaaactaattctaatttttcgcttgagaacttggcatagtttgtccactggaaaatctcaaagcctttaaccaaaggattcctgatttccacagttctcgtcatcagctctctggttgctttagctaatacaccataagcattttccctactgatgttcatcatctgagcgtattggttataagtgaacgataccgtccgttctttccttgtagggttttcaatcgtggggttgagtagtgccacacagcataaaattagcttggtttcatgctccgttaagtcatagcgactaatcgctagttcatttgctttgaaaacaactaattcagacatacatctcaattggtctaggtgattttaatcactataccaattgagatgggctagtcaatgataattactagtccttttcccgggagatctgggtatctgtaaattctgctagacctttgctggaaaacttgtaaattctgctagaccctctgtaaattccgctagacctttgtgtgtttttttt

SEQ ID NO: 924 - DNA, 4939 bp, Synthetic construct
  source 1..4939: mol_type = other DNA
gtttatattcaagtggttataatttatagaataaagaaagaataaaaaaagataaaaagaatagatcccagccctgtgtataactcactactttagtcagttccgcagtattacaaaaggatgtcgcaaacgctgtttgctcctctacaaaacagaccttaaaaccctaaaggcttaagtagcaccctcgcaagctcgggcaaatcgctgaatattccttttgtctccgaccatcaggcacctgagtcgctgtctttttcgtgacattcagttcgctgcgctcacggctctggcagtgaatgggggtaaatggcactacaggcgccttttatggattcatgcaaggaaactacccataatacaagaaaagcccgtcacgggcttctcagggcgttttatggcgggtctgctatgtggtgctatctgactttttgctgttcagcagttcctgccctctgattttccagtctgaccacttcggattatcccgtgacaggtcattcagactggctaatgcacccagtaaggcagcggtatcatcaacaggcttacccgtcttactgtccctagtgcttggattctcaccaataaaaaacgcccggcggcaaccgagcgttctgaacaaatccagatggagttctgaggtcattactggatctatcaacaggagtccaagcgagctctcgaaccccagagtcccgctcagaagaactcgtcaagaaggcgatagaaggcgatgcgctgcgaatcgggagcggcgataccgtaaagcacgaggaagcggtcagcccattcgccgccaagctcttcagcaatatcacgggtagccaacgctatgtcctgatagcggtccgccacacccagccggccacagtcgatgaatccagaaaagcggccattttccaccatgatattcggcaagcaggcatcgccatgggtcacgacgagatcctcgccgtcgggcatgcgcgccttgagcctggcgaacagttcggctggcgcgagcccctgatgctcttcgtccagatcatcctgatcgacaagaccggcttccatccgagtacgtgctcgctcgatgcgatgtttcgcttggtggtcgaatgggcaggtagccggatcaagcgtatgcagccgccgcattgcatcagccatgatggatactttctcggcaggagcaaggtgagatgacaggagatcctgccccggcacttcgcccaatagcagccagtcccttcccgcttcagtgacaacgtcgagcacagctgcgcaaggaacgcccgtcgtggccagccacgatagccgcgctgcctcgtcctgcagttcattcagggcaccggacaggtcggtcttgacaaaaagaaccgggcgcccctgcgctgacagccggaacacggcggcatcagagcagccgattgtctgttgtgcccagtcatagccgaatagcctctccacccaagcggccggagaacctgcgtgcaatccatcttgttcaatcatactccttcctttttcaatattattgaagcatttatcagggttattgtctcatgagcggatacatatttgaatgtatttagaaaaataaacaaataggggttccgcgcacatttccccgaaaagtgccacctgacgtctaagaaaccattattatcatgacattaacctataaaaataggcgtatcacgaggcagaatttcagataaaaaaaatccttagctttcgctaaggatgatttctggaattctaaagatctttgacagctagttatgacaacttgacggctacatcattcactttttcttcacaaccggcacggaactcgctcgggctggccccggtgcattttttaaatacccgcgagaagtagagttgatcgtcaaaaccaacattgcgaccgacggtggcgataggcatccgggtggtgctcaaaagcagcttcgcctggctgatacgttggtcctcgcgccagcttaagacgctaatccctaactgctggcggaaaagatgtgacagacgcgacggcgacaagcaaacatgctgtgcgacgctggcgatatcaaaattgctgtctgccaggtgatcgctgatgtactgacaagcctcgcgtacccgattatccatcggtggatggagcgactcgttaatcgcttccatgcgccgcagtaacaattgctcaagcagatttatcgccagcagctccgaatagcgcccttccccttgcccggcgttaatgatttgcccaaacaggtcgctgaaatgcggctggtgcgcttcatccgggcgaaagaaccccgtattggcaaatattgacggccagttaagccattcatgccagtaggcgcgcggacgaaagtaaacccactggtgataccattcgcgagcctccggatgacgaccgtagtgatgaatctctcctggcgggaacagcaaaatatcacccggtcggcaaacaaattctcgtccctgatttttcaccaccccctgaccgcgaatggtgagattgagaatataacctttcattcccagcggtcggtcgataaaaaaatcgagataaccgttggcctcaatcggcgttaaacccgccaccagatgggcattaaacgagtatcccggcagcaggggatcattttgcgcttcagccatacttttcatactcccgccattcagagaagaaaccaattgtccatattgcatcagacattgccgtcactgcgtcttttactggctcttctcgctaaccaaaccggtaaccccgcttattaaaagcattctgtaacaaagcgggaccaaagccatgacaaaaacgcgtaacaaaagtgtctataatcacggcagaaaagtccacattgattatttgcacggcgtcacactttgctatgccatagcatttttatccataagattagcggatcctacctgacgctttttatcgcaactctctactgtttctccatacccgttttttgggctaacaggaggaattaacgatatcggtgataccagcatcgtcttgatgcccttggcagcaccctgctaaggaggtaacaacaagatgtcatgtttaaaaaatactctatttacacagaacgacatcgtgatcgtgttgctgattatgaatattggtgagatcgtcgtgacgtccctgcgtgttggcaccgatctgagcgtttacatgtcatgcttgaaaaacactctttttacacaaaacgacattgtcatcgtccttcttattatgaatatcggggaaattgtagtaacgagccttcgcgtgggaaccgacttatcggtttacatgtcatgcttaaagaacaccctgttcacccagaatgatatcgtaattgttctgctgatcatgaacattggtgagatcgtagtaacgtcgctgcgcgtcggtacagatctttcagtttactaactaggtataatactagctgagaccagtgactactggtctcagttttagagctagaaatagcaagttaaaataaggctagtccgttatcaacttgaaaaagtggcaccgagtcggtgctttttttataaaacgaaaggctcagtcgaaagactgggcctttcgttttatccgaatacgggttcttgcatgttacattgtcgatctgttcatggtgaacagctttaaatgcaccaaaaactcgtaaaagctctgatgtatctatcttttttacaccgttttcatctgtgcatatggacagttttccctttgatatctaacggtgaacagttgttctacttttgtttgttagtcttgatgcttcactgatagatacaagagccataagaacctcagatccttccgtatttagccagtatgttctctagtgtggttcgttgtttttgcgtgagccatgagaacgaaccattgagatcatgcttactttgcatgtcactcaaaaattttgcctcaaaactggtgagctgaatttttgcagttaaagcatcgtgtagtgtttttcttagtccgttacgtaggtaggaatctgatgtaatggttgttggtattttgtcaccattcatttttatctggttgttctcaagttcggttacgagatccatttgtctatctagttcaacttggaaaatcaacgtatcagtcgggcggcctcgcttatcaaccaccaatttcatattgctgtaagtgtttaaatctttacttattggtttcaaaacccattggttaagccttttaaactcatggtagttattttcaagcattaacatgaacttaaattcatcaaggctaatctctatatttgccttgtgagttttcttttgtgttagttcttttaataaccactcataaatcctcatagagtatttgttttcaaaagacttaacatgttccagattatattttatgaatttttttaactggaaaagataaggcaatatctcttcactaaaaactaattctaatttttcgcttgagaacttggcatagtttgtccactggaaaatctcaaagcctttaaccaaaggattcctgatttccacagttctcgtcatcagctctctggttgctttagctaatacaccataagcattttccctactgatgttcatcatctgagcgtattggttataagtgaacgataccgtccgttctttccttgtagggttttcaatcgtggggttgagtagtgccacacagcataaaattagcttggtttcatgctccgttaagtcatagcgactaatcgctagttcatttgctttgaaaacaactaattcagacatacatctcaattggtctaggtgattttaatcactataccaattgagatgggctagtcaatgataattactagtccttttcccgggagatctgggtatctgtaaattctgctagacctttgctggaaaacttgtaaattctgctagaccctctgtaaattccgctagacctttgtgtgtttttttt

SEQ ID NO: 925 - DNA, 4948 bp, Synthetic construct
  source 1..4948: mol_type = other DNA
gtttatattcaagtggttataatttatagaataaagaaagaataaaaaaagataaaaagaatagatcccagccctgtgtataactcactactttagtcagttccgcagtattacaaaaggatgtcgcaaacgctgtttgctcctctacaaaacagaccttaaaaccctaaaggcttaagtagcaccctcgcaagctcgggcaaatcgctgaatattccttttgtctccgaccatcaggcacctgagtcgctgtctttttcgtgacattcagttcgctgcgctcacggctctggcagtgaatgggggtaaatggcactacaggcgccttttatggattcatgcaaggaaactacccataatacaagaaaagcccgtcacgggcttctcagggcgttttatggcgggtctgctatgtggtgctatctgactttttgctgttcagcagttcctgccctctgattttccagtctgaccacttcggattatcccgtgacaggtcattcagactggctaatgcacccagtaaggcagcggtatcatcaacaggcttacccgtcttactgtccctagtgcttggattctcaccaataaaaaacgcccggcggcaaccgagcgttctgaacaaatccagatggagttctgaggtcattactggatctatcaacaggagtccaagcgagctctcgaaccccagagtcccgctcagaagaactcgtcaagaaggcgatagaaggcgatgcgctgcgaatcgggagcggcgataccgtaaagcacgaggaagcggtcagcccattcgccgccaagctcttcagcaatatcacgggtagccaacgctatgtcctgatagcggtccgccacacccagccggccacagtcgatgaatccagaaaagcggccattttccaccatgatattcggcaagcaggcatcgccatgggtcacgacgagatcctcgccgtcgggcatgcgcgccttgagcctggcgaacagttcggctggcgcgagcccctgatgctcttcgtccagatcatcctgatcgacaagaccggcttccatccgagtacgtgctcgctcgatgcgatgtttcgcttggtggtcgaatgggcaggtagccggatcaagcgtatgcagccgccgcattgcatcagccatgatggatactttctcggcaggagcaaggtgagatgacaggagatcctgccccggcacttcgcccaatagcagccagtcccttcccgcttcagtgacaacgtcgagcacagctgcgcaaggaacgcccgtcgtggccagccacgatagccgcgctgcctcgtcctgcagttcattcagggcaccggacaggtcggtcttgacaaaaagaaccgggcgcccctgcgctgacagccggaacacggcggcatcagagcagccgattgtctgttgtgcccagtcatagccgaatagcctctccacccaagcggccggagaacctgcgtgcaatccatcttgttcaatcatactccttcctttttcaatattattgaagcatttatcagggttattgtctcatgagcggatacatatttgaatgtatttagaaaaataaacaaataggggttccgcgcacatttccccgaaaagtgccacctgacgtctaagaaaccattattatcatgacattaacctataaaaataggcgtatcacgaggcagaatttcagataaaaaaaatccttagctttcgctaaggatgatttctggaattctaaagatctttgacagctagttatgacaacttgacggctacatcattcactttttcttcacaaccggcacggaactcgctcgggctggccccggtgcattttttaaatacccgcgagaagtagagttgatcgtcaaaaccaacattgcgaccgacggtggcgataggcatccgggtggtgctcaaaagcagcttcgcctggctgatacgttggtcctcgcgccagcttaagacgctaatccctaactgctggcggaaaagatgtgacagacgcgacggcgacaagcaaacatgctgtgcgacgctggcgatatcaaaattgctgtctgccaggtgatcgctgatgtactgacaagcctcgcgtacccgattatccatcggtggatggagcgactcgttaatcgcttccatgcgccgcagtaacaattgctcaagcagatttatcgccagcagctccgaatagcgcccttccccttgcccggcgttaatgatttgcccaaacaggtcgctgaaatgcggctggtgcgcttcatccgggcgaaagaaccccgtattggcaaatattgacggccagttaagccattcatgccagtaggcgcgcggacgaaagtaaacccactggtgataccattcgcgagcctccggatgacgaccgtagtgatgaatctctcctggcgggaacagcaaaatatcacccggtcggcaaacaaattctcgtccctgatttttcaccaccccctgaccgcgaatggtgagattgagaatataacctttcattcccagcggtcggtcgataaaaaaatcgagataaccgttggcctcaatcggcgttaaacccgccaccagatgggcattaaacgagtatcccggcagcaggggatcattttgcgcttcagccatacttttcatactcccgccattcagagaagaaaccaattgtccatattgcatcagacattgccgtcactgcgtcttttactggctcttctcgctaaccaaaccggtaaccccgcttattaaaagcattctgtaacaaagcgggaccaaagccatgacaaaaacgcgtaacaaaagtgtctataatcacggcagaaaagtccacattgattatttgcacggcgtcacactttgctatgccatagcatttttatccataagattagcggatcctacctgacgctttttatcgcaactctctactgtttctccatacccgttttttgggctaacaggaggaattaacgatatcggtgataccagcatcgtcttgatgcccttggcagcaccctgctaaggaggtaacaacaagatgaatcctatcatccaagtgttgcttaccgtcgtcacagtgattggtttcaccaagacctgtgggaggcttgacaacctgttagatatgctgtataatgtaatcagtagcgtggagtcaataatgaatcctattatacaagttctattaacagtagtgaccgttatcggcttcaccaagacgtgcggtcgtctggataatttgctggacatgctgtacaacgtgatctccagcgttgagagcattatgaaccctatcatccaggtgttactgacggttgttactgttatcgggtttaccaaaacctgtggccgtttagacaaccttctggatatgctttataacgttattagttcggtagaaagcatataactaggtataatactagctgagaccagtgactactggtctcagttttagagctagaaatagcaagttaaaataaggctagtccgttatcaacttgaaaaagtggcaccgagtcggtgctttttttataaaacgaaaggctcagtcgaaagactgggcctttcgttttatccgaatacgggttcttgcatgttacattgtcgatctgttcatggtgaacagctttaaatgcaccaaaaactcgtaaaagctctgatgtatctatcttttttacaccgttttcatctgtgcatatggacagttttccctttgatatctaacggtgaacagttgttctacttttgtttgttagtcttgatgcttcactgatagatacaagagccataagaacctcagatccttccgtatttagccagtatgttctctagtgtggttcgttgtttttgcgtgagccatgagaacgaaccattgagatcatgcttactttgcatgtcactcaaaaattttgcctcaaaactggtgagctgaatttttgcagttaaagcatcgtgtagtgtttttcttagtccgttacgtaggtaggaatctgatgtaatggttgttggtattttgtcaccattcatttttatctggttgttctcaagttcggttacgagatccatttgtctatctagttcaacttggaaaatcaacgtatcagtcgggcggcctcgcttatcaaccaccaatttcatattgctgtaagtgtttaaatctttacttattggtttcaaaacccattggttaagccttttaaactcatggtagttattttcaagcattaacatgaacttaaattcatcaaggctaatctctatatttgccttgtgagttttcttttgtgttagttcttttaataaccactcataaatcctcatagagtatttgttttcaaaagacttaacatgttccagattatattttatgaatttttttaactggaaaagataaggcaatatctcttcactaaaaactaattctaatttttcgcttgagaacttggcatagtttgtccactggaaaatctcaaagcctttaaccaaaggattcctgatttccacagttctcgtcatcagctctctggttgctttagctaatacaccataagcattttccctactgatgttcatcatctgagcgtattggttataagtgaacgataccgtccgttctttccttgtagggttttcaatcgtggggttgagtagtgccacacagcataaaattagcttggtttcatgctccgttaagtcatagcgactaatcgctagttcatttgctttgaaaacaactaattcagacatacatctcaattggtctaggtgattttaatcactataccaattgagatgggctagtcaatgataattactagtccttttcccgggagatctgggtatctgtaaattctgctagacctttgctggaaaacttgtaaattctgctagaccctctgtaaattccgctagacctttgtgtgtttttttt

SEQ ID NO: 926 - DNA, 4948 bp, Synthetic construct
  source 1..4948: mol_type = other DNA
gtttatattcaagtggttataatttatagaataaagaaagaataaaaaaagataaaaagaatagatcccagccctgtgtataactcactactttagtcagttccgcagtattacaaaaggatgtcgcaaacgctgtttgctcctctacaaaacagaccttaaaaccctaaaggcttaagtagcaccctcgcaagctcgggcaaatcgctgaatattccttttgtctccgaccatcaggcacctgagtcgctgtctttttcgtgacattcagttcgctgcgctcacggctctggcagtgaatgggggtaaatggcactacaggcgccttttatggattcatgcaaggaaactacccataatacaagaaaagcccgtcacgggcttctcagggcgttttatggcgggtctgctatgtggtgctatctgactttttgctgttcagcagttcctgccctctgattttccagtctgaccacttcggattatcccgtgacaggtcattcagactggctaatgcacccagtaaggcagcggtatcatcaacaggcttacccgtcttactgtccctagtgcttggattctcaccaataaaaaacgcccggcggcaaccgagcgttctgaacaaatccagatggagttctgaggtcattactggatctatcaacaggagtccaagcgagctctcgaaccccagagtcccgctcagaagaactcgtcaagaaggcgatagaaggcgatgcgctgcgaatcgggagcggcgataccgtaaagcacgaggaagcggtcagcccattcgccgccaagctcttcagcaatatcacgggtagccaacgctatgtcctgatagcggtccgccacacccagccggccacagtcgatgaatccagaaaagcggccattttccaccatgatattcggcaagcaggcatcgccatgggtcacgacgagatcctcgccgtcgggcatgcgcgccttgagcctggcgaacagttcggctggcgcgagcccctgatgctcttcgtccagatcatcctgatcgacaagaccggcttccatccgagtacgtgctcgctcgatgcgatgtttcgcttggtggtcgaatgggcaggtagccggatcaagcgtatgcagccgccgcattgcatcagccatgatggatactttctcggcaggagcaaggtgagatgacaggagatcctgccccggcacttcgcccaatagcagccagtcccttcccgcttcagtgacaacgtcgagcacagctgcgcaaggaacgcccgtcgtggccagccacgatagccgcgctgcctcgtcctgcagttcattcagggcaccggacaggtcggtcttgacaaaaagaaccgggcgcccctgcgctgacagccggaacacggcggcatcagagcagccgattgtctgttgtgcccagtcatagccgaatagcctctccacccaagcggccggagaacctgcgtgcaatccatcttgttcaatcatactccttcctttttcaatattattgaagcatttatcagggttattgtctcatgagcggatacatatttgaatgtatttagaaaaataaacaaataggggttccgcgcacatttccccgaaaagtgccacctgacgtctaagaaaccattattatcatgacattaacctataaaaataggcgtatcacgaggcagaatttcagataaaaaaaatccttagctttcgctaaggatgatttctggaattctaaagatctttgacagctagttatgacaacttgacggctacatcattcactttttcttcacaaccggcacggaactcgctcgggctggccccggtgcattttttaaatacccgcgagaagtagagttgatcgtcaaaaccaacattgcgaccgacggtggcgataggcatccgggtggtgctcaaaagcagcttcgcctggctgatacgttggtcctcgcgccagcttaagacgctaatccctaactgctggcggaaaagatgtgacagacgcgacggcgacaagcaaacatgctgtgcgacgctggcgatatcaaaattgctgtctgccaggtgatcgctgatgtactgacaagcctcgcgtacccgattatccatcggtggatggagcgactcgttaatcgcttccatgcgccgcagtaacaattgctcaagcagatttatcgccagcagctccgaatagcgcccttccccttgcccggcgttaatgatttgcccaaacaggtcgctgaaatgcggctggtgcgcttcatccgggcgaaagaaccccgtattggcaaatattgacggccagttaagccattcatgccagtaggcgcgcggacgaaagtaaacccactggtgataccattcgcgagcctccggatgacgaccgtagtgatgaatctctcctggcgggaacagcaaaatatcacccggtcggcaaacaaattctcgtccctgatttttcaccaccccctgaccgcgaatggtgagattgagaatataacctttcattcccagcggtcggtcgataaaaaaatcgagataaccgttggcctcaatcggcgttaaacccgccaccagatgggcattaaacgagtatcccggcagcaggggatcattttgcgcttcagccatacttttcatactcccgccattcagagaagaaaccaattgtccatattgcatcagacattgccgtcactgcgtcttttactggctcttctcgctaaccaaaccggtaaccccgcttattaaaagcattctgtaacaaagcgggaccaaagccatgacaaaaacgcgtaacaaaagtgtctataatcacggcagaaaagtccacattgattatttgcacggcgtcacactttgctatgccatagcatttttatccataagattagcggatcctacctgacgctttttatcgcaactctctactgtttctccatacccgttttttgggctaacaggaggaattaacgatatcggtgataccagcatcgtcttgatgcccttggcagcaccctgctaaggaggtaacaacaagatgaatatcatccaagtgttgcttaccgtcgtcacagtgattggtttccctaccaagacctgtgggaggcttgacaacctgttagatatgctgtataatgtaatcagtagcgtggagtcaataatgaatattatacaagttctattaacagtagtgaccgttatcggcttccctaccaagacgtgcggtcgtctggataatttgctggacatgctgtacaacgtgatctccagcgttgagagcattatgaacatcatccaggtgttactgacggttgttactgttatcgggtttcctaccaaaacctgtggccgtttagacaaccttctggatatgctttataacgttattagttcggtagaaagcatataactaggtataatactagctgagaccagtgactactggtctcagttttagagctagaaatagcaagttaaaataaggctagtccgttatcaacttgaaaaagtggcaccgagtcggtgctttttttataaaacgaaaggctcagtcgaaagactgggcctttcgttttatccgaatacgggttcttgcatgttacattgtcgatctgttcatggtgaacagctttaaatgcaccaaaaactcgtaaaagctctgatgtatctatcttttttacaccgttttcatctgtgcatatggacagttttccctttgatatctaacggtgaacagttgttctacttttgtttgttagtcttgatgcttcactgatagatacaagagccataagaacctcagatccttccgtatttagccagtatgttctctagtgtggttcgttgtttttgcgtgagccatgagaacgaaccattgagatcatgcttactttgcatgtcactcaaaaattttgcctcaaaactggtgagctgaatttttgcagttaaagcatcgtgtagtgtttttcttagtccgttacgtaggtaggaatctgatgtaatggttgttggtattttgtcaccattcatttttatctggttgttctcaagttcggttacgagatccatttgtctatctagttcaacttggaaaatcaacgtatcagtcgggcggcctcgcttatcaaccaccaatttcatattgctgtaagtgtttaaatctttacttattggtttcaaaacccattggttaagccttttaaactcatggtagttattttcaagcattaacatgaacttaaattcatcaaggctaatctctatatttgccttgtgagttttcttttgtgttagttcttttaataaccactcataaatcctcatagagtatttgttttcaaaagacttaacatgttccagattatattttatgaatttttttaactggaaaagataaggcaatatctcttcactaaaaactaattctaatttttcgcttgagaacttggcatagtttgtccactggaaaatctcaaagcctttaaccaaaggattcctgatttccacagttctcgtcatcagctctctggttgctttagctaatacaccataagcattttccctactgatgttcatcatctgagcgtattggttataagtgaacgataccgtccgttctttccttgtagggttttcaatcgtggggttgagtagtgccacacagcataaaattagcttggtttcatgctccgttaagtcatagcgactaatcgctagttcatttgctttgaaaacaactaattcagacatacatctcaattggtctaggtgattttaatcactataccaattgagatgggctagtcaatgataattactagtccttttcccgggagatctgggtatctgtaaattctgctagacctttgctggaaaacttgtaaattctgctagaccctctgtaaattccgctagacctttgtgtgtttttttt

SEQ ID NO: 927 - DNA, 4948 bp, Synthetic construct
  source 1..4948: mol_type = other DNA
gtttatattcaagtggttataatttatagaataaagaaagaataaaaaaagataaaaagaatagatcccagccctgtgtataactcactactttagtcagttccgcagtattacaaaaggatgtcgcaaacgctgtttgctcctctacaaaacagaccttaaaaccctaaaggcttaagtagcaccctcgcaagctcgggcaaatcgctgaatattccttttgtctccgaccatcaggcacctgagtcgctgtctttttcgtgacattcagttcgctgcgctcacggctctggcagtgaatgggggtaaatggcactacaggcgccttttatggattcatgcaaggaaactacccataatacaagaaaagcccgtcacgggcttctcagggcgttttatggcgggtctgctatgtggtgctatctgactttttgctgttcagcagttcctgccctctgattttccagtctgaccacttcggattatcccgtgacaggtcattcagactggctaatgcacccagtaaggcagcggtatcatcaacaggcttacccgtcttactgtccctagtgcttggattctcaccaataaaaaacgcccggcggcaaccgagcgttctgaacaaatccagatggagttctgaggtcattactggatctatcaacaggagtccaagcgagctctcgaaccccagagtcccgctcagaagaactcgtcaagaaggcgatagaaggcgatgcgctgcgaatcgggagcggcgataccgtaaagcacgaggaagcggtcagcccattcgccgccaagctcttcagcaatatcacgggtagccaacgctatgtcctgatagcggtccgccacacccagccggccacagtcgatgaatccagaaaagcggccattttccaccatgatattcggcaagcaggcatcgccatgggtcacgacgagatcctcgccgtcgggcatgcgcgccttgagcctggcgaacagttcggctggcgcgagcccctgatgctcttcgtccagatcatcctgatcgacaagaccggcttccatccgagtacgtgctcgctcgatgcgatgtttcgcttggtggtcgaatgggcaggtagccggatcaagcgtatgcagccgccgcattgcatcagccatgatggatactttctcggcaggagcaaggtgagatgacaggagatcctgccccggcacttcgcccaatagcagccagtcccttcccgcttcagtgacaacgtcgagcacagctgcgcaaggaacgcccgtcgtggccagccacgatagccgcgctgcctcgtcctgcagttcattcagggcaccggacaggtcggtcttgacaaaaagaaccgggcgcccctgcgctgacagccggaacacggcggcatcagagcagccgattgtctgttgtgcccagtcatagccgaatagcctctccacccaagcggccggagaacctgcgtgcaatccatcttgttcaatcatactccttcctttttcaatattattgaagcatttatcagggttattgtctcatgagcggatacatatttgaatgtatttagaaaaataaacaaataggggttccgcgcacatttccccgaaaagtgccacctgacgtctaagaaaccattattatcatgacattaacctataaaaataggcgtatcacgaggcagaatttcagataaaaaaaatccttagctttcgctaaggatgatttctggaattctaaagatctttgacagctagttatgacaacttgacggctacatcattcactttttcttcacaaccggcacggaactcgctcgggctggccccggtgcattttttaaatacccgcgagaagtagagttgatcgtcaaaaccaacattgcgaccgacggtggcgataggcatccgggtggtgctcaaaagcagcttcgcctggctgatacgttggtcctcgcgccagcttaagacgctaatccctaactgctggcggaaaagatgtgacagacgcgacggcgacaagcaaacatgctgtgcgacgctggcgatatcaaaattgctgtctgccaggtgatcgctgatgtactgacaagcctcgcgtacccgattatccatcggtggatggagcgactcgttaatcgcttccatgcgccgcagtaacaattgctcaagcagatttatcgccagcagctccgaatagcgcccttccccttgcccggcgttaatgatttgcccaaacaggtcgctgaaatgcggctggtgcgcttcatccgggcgaaagaaccccgtattggcaaatattgacggccagttaagccattcatgccagtaggcgcgcggacgaaagtaaacccactggtgataccattcgcgagcctccggatgacgaccgtagtgatgaatctctcctggcgggaacagcaaaatatcacccggtcggcaaacaaattctcgtccctgatttttcaccaccccctgaccgcgaatggtgagattgagaatataacctttcattcccagcggtcggtcgataaaaaaatcgagataaccgttggcctcaatcggcgttaaacccgccaccagatgggcattaaacgagtatcccggcagcaggggatcattttgcgcttcagccatacttttcatactcccgccattcagagaagaaaccaattgtccatattgcatcagacattgccgtcactgcgtcttttactggctcttctcgctaaccaaaccggtaaccccgcttattaaaagcattctgtaacaaagcgggaccaaagccatgacaaaaacgcgtaacaaaagtgtctataatcacggcagaaaagtccacattgattatttgcacggcgtcacactttgctatgccatagcatttttatccataagattagcggatcctacctgacgctttttatcgcaactctctactgtttctccatacccgttttttgggctaacaggaggaattaacgatatcggtgataccagcatcgtcttgatgcccttggcagcaccctgctaaggaggtaacaacaagatgaatatcatccaagtgttgcttaccgtcgtcacagtgattggtttcaccaagacctgtgggaggcttgacaacctgttagatatgctgtataatcctgtaatcagtagcgtggagtcaataatgaatattatacaagttctattaacagtagtgaccgttatcggcttcaccaagacgtgcggtcgtctggataatttgctggacatgctgtacaaccctgtgatctccagcgttgagagcattatgaacatcatccaggtgttactgacggttgttactgttatcgggtttaccaaaacctgtggccgtttagacaaccttctggatatgctttataaccctgttattagttcggtagaaagcatataactaggtataatactagctgagaccagtgactactggtctcagttttagagctagaaatagcaagttaaaataaggctagtccgttatcaacttgaaaaagtggcaccgagtcggtgctttttttataaaacgaaaggctcagtcgaaagactgggcctttcgttttatccgaatacgggttcttgcatgttacattgtcgatctgttcatggtgaacagctttaaatgcaccaaaaactcgtaaaagctctgatgtatctatcttttttacaccgttttcatctgtgcatatggacagttttccctttgatatctaacggtgaacagttgttctacttttgtttgttagtcttgatgcttcactgatagatacaagagccataagaacctcagatccttccgtatttagccagtatgttctctagtgtggttcgttgtttttgcgtgagccatgagaacgaaccattgagatcatgcttactttgcatgtcactcaaaaattttgcctcaaaactggtgagctgaatttttgcagttaaagcatcgtgtagtgtttttcttagtccgttacgtaggtaggaatctgatgtaatggttgttggtattttgtcaccattcatttttatctggttgttctcaagttcggttacgagatccatttgtctatctagttcaacttggaaaatcaacgtatcagtcgggcggcctcgcttatcaaccaccaatttcatattgctgtaagtgtttaaatctttacttattggtttcaaaacccattggttaagccttttaaactcatggtagttattttcaagcattaacatgaacttaaattcatcaaggctaatctctatatttgccttgtgagttttcttttgtgttagttcttttaataaccactcataaatcctcatagagtatttgttttcaaaagacttaacatgttccagattatattttatgaatttttttaactggaaaagataaggcaatatctcttcactaaaaactaattctaatttttcgcttgagaacttggcatagtttgtccactggaaaatctcaaagcctttaaccaaaggattcctgatttccacagttctcgtcatcagctctctggttgctttagctaatacaccataagcattttccctactgatgttcatcatctgagcgtattggttataagtgaacgataccgtccgttctttccttgtagggttttcaatcgtggggttgagtagtgccacacagcataaaattagcttggtttcatgctccgttaagtcatagcgactaatcgctagttcatttgctttgaaaacaactaattcagacatacatctcaattggtctaggtgattttaatcactataccaattgagatgggctagtcaatgataattactagtccttttcccgggagatctgggtatctgtaaattctgctagacctttgctggaaaacttgtaaattctgctagaccctctgtaaattccgctagacctttgtgtgtttttttt

SEQ ID NO: 928 - DNA, 4522 bp, Synthetic construct
  source 1..4522: mol_type = other DNA
gggccaccgggggggattttcgcggcgggactttatcagatgccctctcgaaaatttgccaaaaacaattgcgcctttcgctgtccactcttgcgaaactgaagcacctcctttatattaaaggggctcatcggatttgccggtgaggaaagtgacaggttgtcaagccacgcgaatccgctccatgagctgagacgcaacgcggacaacacgtagaacaggacttccgtcatacggacctctacgatgatactgccatgatactgcatttctaacatttagcggccaaagctcagttttcggactgagtgagataatgtgaagaacattgttgtatatccggggaggcggttattggaatgccgccaaccatcgcctctccggtttgctaggtatatcgatggactacaaagaccatgacggtgattataaagatcatgacatcgattacaaggatgacgatgacaagggaggaagcggatcgatgagcgaaccagtcgagtggtttaagcgccgaagatatttgcactttgacttaccaaccagcgaacctgctgcggtcgcaatcgccggaaatccatctatagtcgcacgtcacgccttctatccgtttatccagttcacggttaaaagccgaaaagtgaaatgggacaaactgactaaacgcctagtgacgaccgagaaggaacgtccggtcagttatgcatcgcacgtcgatagccacatctacgcttgctacgcctcgatattaagccaacgctacgaagattacctcaaagaagttgggtaccagtcttcagtgctcgcttttcggaaactcggaaagagtaacattgaatttgccaaagacgcgttcgacgccattaaagaaatgggaggtgctgatgtcatcgccgctgacatcagcgatttctttggaagtctaaatcacaaaattctgaaagccagttgggcgaaaatcctcaaagtcaatgaattgcccaacgatcactacaacgttttcaaatcactgactcgctttacctgggtagataaaaccaatctatacaaagccctaggaatttcgatttacaaccctaggggctcaggagctcgcatttgcacaccagaaatatttcgctccgtcgttcgcaagctcggccttattcaacgaaacgcagcagataaagggattcctcaaggctcccccattagcgccctgctgtctaatatttacatgaccgactttgatcaagcgctgtggacttccatcgcgtcaatgggcggaaaatacttccgatactgcgacgacatgctaatcattgcgccggaaggaaaaggtaaggaatttatgcgactcgctcgcgagcttgcagacctatacgcgctccccctacatccgaagaagactgaggagagattcttcacatcaagctcaggaaaactgctggccgataagccacttcaatacctcggatttgtcttcgacgggcagcaagtatcgcttcgctcagcgtcgctcgctcgttattcagaccgcatgagaagaggtgtgcgcctagcgcgagtgaccatgcatgcccgcaacactcttcgcgtagaacgcggcgaaagcccaagacccctatacaaaggtaaactgtatcgacggtattcataccttgggcgtcgaaactttgtatcgtatgcgatacgcgcagccaatattctggacgaaaaggctataaagcggcaggtaaaaccgctctggaaacggttacgcagccagatgaagtgaataaattctctactagccttacaaaaaaggcccacaccgacaatctatcgatgtgggcctttcgtgtttctagcggcatgccttacgcatcccgcctagtgtcctctacagagcatcaccgccattgtcccaacgggacaattccgtgggacaatccgggacacatgaacggtggtcttgggacaacccggcagaattattcctgcccctggctcgtcaggaactcctcgtaattcccgccgaagtcgaacagcgtgccgtccgtgcgcacttcgatgatccggttcgccagcccgctcacgaactcgcggtcgtgcgacacgaagatcagcgtgccttcgaactgctccagcgcgatctgcagcgactcgatcgattccatgtccatgtggttggtcggctcgtccatcagcagcacgttgtggcggccgagagcaataactagcataaccccttggggcctctaaacgggtcttgaggggttttttgctgaaacctcaggcatttgagaagcacacggtcacactgcttccggtagtcaataaaccggtaaaccagcaatagacataagcggctatttaacgaccctgccctgaaccgacgaccgggtcgaatttgctttcgaatttctgccattcatccgcttattatcacttattcaggcgtagcaccaggcgtttaagggcaccaataactgccttaaaaaaattacgccccgccctgccactcatcgcagtactgttgtaattcattaagcattctgccgacatggaagccatcacagacggcatgatgaacctgaatcgccagcggcatcagcaccttgtcgccttgcgtataatatttgcccatagtgaaaacgggggcgaagaagttgtccatattggccacgtttaaatcaaaactggtgaaactcacccagggattggctgagacgaaaaacatattctcaataaaccctttagggaaataggccaggttttcaccgtaacacgccacatcttgcgaatatatgtgtagaaactgccggaaatcgtcgtggtattcactccagagcgatgaaaacgtttcagtttgctcatggaaaacggtgtaacaagggtgaacactatcccatatcaccagctcaccgtctttcattgccatacggaactccggatgagcattcatcaggcgggcaagaatgtgaataaaggccggataaaacttgtgcttatttttctttacggtctttaaaaaggccgtaatatccagctgaacggtctggttataggtacattgagcaactgactgaaatgcctcaaaatgttctttacgatgccattgggatatatcaacggtggtatatccagtgatttttttctccattttagcttccttagctcctgaaaatctcgataactcaaaaaatacgcccggtagtgatcttatttcattatggtgaaagttggaacctcttacgtgccgatcaacgtctcattttcgccaaaagttggcccagggcttcccggtatcaacagggacaccaggatttatttattctgcgaagtgatcttccgtcacaggtatttattcggcgcaaagtgcgtcgggtgatgctgccaacttactgatttagtgtatgatggtgtttttgaggtgctccagtggcttctgtttctatcagctgtccctcctgttcagctactgacggggtggtgcgtaacggcaaaagcaccgccggacatcagcgctagcggagtgtatactggcttactatgttggcactgatgagggtgtcagtgaagtgcttcatgtggcaggagaaaaaaggctgcaccggtgcgtcagcagaatatgtgatacaggatatattccgcttcctcgctcactgactcgctacgctcggtcgttcgactgcggcgagcggaaatggcttacgaacggggcggagatttcctggaagatgccaggaagatacttaacagggaagtgagagggccgcggcaaagccgtttttccataggctccgcccccctgacaagcatcacgaaatctgacgctcaaatcagtggtggcgaaacccgacaggactataaagataccaggcgtttcccctggcggctccctcgtgcgctctcctgttcctgcctttcggtttaccggtgtcattccgctgttatggccgcgtttgtctcattccacgcctgacactcagttccgggtaggcagttcgctccaagctggactgtatgcacgaaccccccgttcagtccgaccgctgcgccttatccggtaactatcgtcttgagtccaacccggaaagacatgcaaaagcaccactggcagcagccactggtaattgatttagaggagttagtcttgaagtcatgcgccggttaaggctaaactgaaaggacaagttttggtgactgcgctcctccaagccagttacctcggttcaaagagttggtagctcagagaaccttcgaaaaaccgccctgcaaggcggttttttcgttttcagagcaagagattacgcgcagaccaaaacgatctcaagaagatcatcttattaatcagataaaatatttctagatttcagtgcaatttatctcttcaaatgtagcacctgaagtcagccccatacgatataagttgtaattctcatgttagtcatgccccgcgcccaccggaaggagctgactgggttgaaggctctcaagggcatcggtcgagatcccggtgcctaatgagtgagctaacttacattaattgcgttgcgct

SEQ ID NO: 929 - DNA, 4257 bp, Synthetic construct
  source 1..4257: mol_type = other DNA
cagtggtctagcgagggctgatcaaggctagatctggcacaagccacaggtgcatatctgcatcaattttatgctagccttcaagggctttggatgtagatccaaaggtgcatcacaagctgtcaaggcccatcgcggcaccacaggtgaaataacccagggtgaccagcagtgcggccagcagcgctcggatacttattctcataggtactccaagtgtgacgctgacattatacgtcgatcctagcaatcgcggcgaaatcggaactgggtgactatgaccgattggatgatgtgaggagcattttggtttatccggccaggcggcttatgggattgccgccatcctaagcctggccggttggctaaaaacaaggatgtaatcttatggactacaaagaccatgacggtgattataaagatcatgacatcgattacaaggatgacgatgacaagggaggaagcggatcgatggcagaagcttggtacaaatctcgcggatacctgcattttgatcgtccggttaatcaagcgactgcaaccgagatagtttcaagccccgatgctgtatccaggcacgcgttttatcccttcattcggtatgttgcacagacacagaaagtattctttgacaaaggtcttggaaaagttgtcaaaaaagagcctaagaaaaggcctatttcgtatgctgcccacgtagatagccatatctactcttattattgtgaaaagttaagtaaagcatatgaagatcacctcgggaaggtgccgtggtcatcttcgattctggcgtttagatcccttggtaaaagcaatatagattttgctcgggatgctttcctagatatttcagtgcgcgattctagttgcgttatagcaatcgatataaagggtttttttgaaaatttaaaccatgcgcacttgaaaaaatcctggcagaccctgctcggcacaagcacgttgcctgatgatcactacgcggtgtatcgatctctgactaagtattcattcgtaaacagggatcaggtttacgaggtacttgggctttcaaagaataatcccaagaatgggcgtaaacgtatttgcgagccgcagaagttcagagaaaaggttcgcaatggcggcttgattgaaaccaataagctcaacaaaggaatcccacaaggctcccccattagtgccatgctttcaaatgtttacatgatgggatttgatgagcaggttcatgcctatgttcaggcctgtggaggctcatactatcggtactgtgatgatgtgttgctcatcgtgccgctagcaaaagaagccgaggccaaggatttcgttaaccaaagggtcgatgaaattggcttagaaatacaggaagccaagacagaaacatgcaaattcacacggtcagcaaaagggttacggactgaccgaccgcttcaataccttggattcatttttgacggcgccaacatttatctgcgctcatcttctctggctcgctatcaagaccgcgtaaatagaggaatatgggtagccggaaaatgtatggacaaggtgaatgccaaaagaatttctagggggcagctgccccgctcgatgttcttgaaaaagctctacaagcgctattcgtacctggggcgtcgaaattttatttcctatggctaccgggcggccaaaatcatggactccccctccatcagaaagcagctcaagccgcactggagacgcttgcgggagcgcatctccgacgctcagggcgaatgacctcgcaacatagctacgaacttcgtgatagagaatggcttctctagaaaatctgcgagaaggctctgtaggtggcgcactactcaatcatcgagtgggcgtttatcgggtgattgccaaacagatgtgatgctgccaccgtaatgacagatgtcattgcagagggctgagcaataactagcataaccccttggggcctctaaacgggtcttgaggggttttttgctgaaacctcaggcatttgagaagcacacggtcacactgcttccggtagtcaataaaccggtaaaccagcaatagacataagcggctatttaacgaccctgccctgaaccgacgaccgggtcgaatttgctttcgaatttctgccattcatccgcttattatcacttattcaggcgtagcaccaggcgtttaagggcaccaataactgccttaaaaaaattacgccccgccctgccactcatcgcagtactgttgtaattcattaagcattctgccgacatggaagccatcacagacggcatgatgaacctgaatcgccagcggcatcagcaccttgtcgccttgcgtataatatttgcccatagtgaaaacgggggcgaagaagttgtccatattggccacgtttaaatcaaaactggtgaaactcacccagggattggctgagacgaaaaacatattctcaataaaccctttagggaaataggccaggttttcaccgtaacacgccacatcttgcgaatatatgtgtagaaactgccggaaatcgtcgtggtattcactccagagcgatgaaaacgtttcagtttgctcatggaaaacggtgtaacaagggtgaacactatcccatatcaccagctcaccgtctttcattgccatacggaactccggatgagcattcatcaggcgggcaagaatgtgaataaaggccggataaaacttgtgcttatttttctttacggtctttaaaaaggccgtaatatccagctgaacggtctggttataggtacattgagcaactgactgaaatgcctcaaaatgttctttacgatgccattgggatatatcaacggtggtatatccagtgatttttttctccattttagcttccttagctcctgaaaatctcgataactcaaaaaatacgcccggtagtgatcttatttcattatggtgaaagttggaacctcttacgtgccgatcaacgtctcattttcgccaaaagttggcccagggcttcccggtatcaacagggacaccaggatttatttattctgcgaagtgatcttccgtcacaggtatttattcggcgcaaagtgcgtcgggtgatgctgccaacttactgatttagtgtatgatggtgtttttgaggtgctccagtggcttctgtttctatcagctgtccctcctgttcagctactgacggggtggtgcgtaacggcaaaagcaccgccggacatcagcgctagcggagtgtatactggcttactatgttggcactgatgagggtgtcagtgaagtgcttcatgtggcaggagaaaaaaggctgcaccggtgcgtcagcagaatatgtgatacaggatatattccgcttcctcgctcactgactcgctacgctcggtcgttcgactgcggcgagcggaaatggcttacgaacggggcggagatttcctggaagatgccaggaagatacttaacagggaagtgagagggccgcggcaaagccgtttttccataggctccgcccccctgacaagcatcacgaaatctgacgctcaaatcagtggtggcgaaacccgacaggactataaagataccaggcgtttcccctggcggctccctcgtgcgctctcctgttcctgcctttcggtttaccggtgtcattccgctgttatggccgcgtttgtctcattccacgcctgacactcagttccgggtaggcagttcgctccaagctggactgtatgcacgaaccccccgttcagtccgaccgctgcgccttatccggtaactatcgtcttgagtccaacccggaaagacatgcaaaagcaccactggcagcagccactggtaattgatttagaggagttagtcttgaagtcatgcgccggttaaggctaaactgaaaggacaagttttggtgactgcgctcctccaagccagttacctcggttcaaagagttggtagctcagagaaccttcgaaaaaccgccctgcaaggcggttttttcgttttcagagcaagagattacgcgcagaccaaaacgatctcaagaagatcatcttattaatcagataaaatatttctagatttcagtgcaatttatctcttcaaatgtagcacctgaagtcagccccatacgatataagttgtaattctcatgttagtcatgccccgcgcccaccggaaggagctgactgggttgaaggctctcaagggcatcggtcgagatcccggtgcctaatgagtgagctaacttacattaattgcgttgcgct

SEQ ID NO: 930 - DNA, 4208 bp, Synthetic construct
  source 1..4208: mol_type = other DNA
gtaagtagcatcagtgtcagacaagatcttccaaaatatatcactcctagagatttctacccacgttcattctgaggaataaaatgcaaagtgacattgatcaatttgtaaaaaaatattatgttattagtgctttacgcgataggcgtgaagggctgtgacagattgtcaatgcctttatccttgcagagccaagataaacacattgtcatgaagcgtaagattaccattgtatagtctccatcgcagattacattatatatcatttctaatagatcgcggcgtgtgcctttaggggccagatgattggttaggccagttagttaaagcccaaagggatatacggaaaggccgcatgtccactccctttgggttttgctagaatagaatccctcttcttatggactacaaagaccatgacggtgattataaagatcatgacatcgattacaaggatgacgatgacaagggaggaagcggatcgatgaaaaacacttctgagcacccttggtttaccaagcgaaactatcttcattttgatatacctgtctcagttcataaggctgaacgaatagcatccgagccaataacggttgcaaggcatgccttttttcctttcatctcatatagtttccagcttacgaaattagatcgagatacttctactggaaagctataccgtaagccgaagccaagaggagttgcctattcatcgcatgtagatagccatatctatgcgttttatgcttctcaactatcaaccttatacgaaaagcaaatcgagaaattaggattgcatgagtcagtattagctttccgtaaattggatggaaaaagtaatattcatttcgctgatgatgcgtttaagcacataagtaagtttgaagattgttctgttatagctttggatttctctaaatttttcgacacattagaccatcaaattttaaaggaagaatggagaaaactactcggtgaggattgcttgccaaaagatcactataatgttttccgttcattgaccaaattttcaacggttgataaatgtgctctttttgatctatttgatatctctcaatataaccctaaagctaacgggcgcaatcgagtttgttcacctagtgagtttaggcagaaagtacgtggttctgggttgattgagcaaaatccgaatggaatgatgggtatcccccaaggctcaccgatcagcgcattactttctaatatatatatgctcaattttgacgcacaaatgaagagctatgttgactctgttgatggcaagtattttcggtattgtgatgacatgctgtttattgttccttccgaacatcgagatatgatagagaaactagcaaatagtaaagttactgcactaaaagtaaaaattaatagtgataaaacagagattagagactttagaattcacgatggcaagttgagttcatttgacgaacatggtaaacaaaaaccattacagtatttaggttttttgtttgatgggcactcgatttttttgcgctctactgcgttggctcgttattctgaaaaaatgaaaggtggcgtaaaactagctaagaaaacgatggaaaaagagaatcgaatccgtcgtgacaaaggtgagccagagcaaacatatctatacaaaagaaagcttcacaaactgtatacagcgcgtggtcaaagaaactttctatcgtacggatatcgagcggccaaaatcatgaactcaaagagcataagaaaacaattgaagcctctttggcaacgttttcaagatgaggtatccaaatagatcatttcagatagtagtaacagcctctaattgagttttatgtcgtgatattacagctagtagatttgaacgtcacttaaagcaataactagcataaccccttggggcctctaaacgggtcttgaggggttttttgctgaaacctcaggcatttgagaagcacacggtcacactgcttccggtagtcaataaaccggtaaaccagcaatagacataagcggctatttaacgaccctgccctgaaccgacgaccgggtcgaatttgctttcgaatttctgccattcatccgcttattatcacttattcaggcgtagcaccaggcgtttaagggcaccaataactgccttaaaaaaattacgccccgccctgccactcatcgcagtactgttgtaattcattaagcattctgccgacatggaagccatcacagacggcatgatgaacctgaatcgccagcggcatcagcaccttgtcgccttgcgtataatatttgcccatagtgaaaacgggggcgaagaagttgtccatattggccacgtttaaatcaaaactggtgaaactcacccagggattggctgagacgaaaaacatattctcaataaaccctttagggaaataggccaggttttcaccgtaacacgccacatcttgcgaatatatgtgtagaaactgccggaaatcgtcgtggtattcactccagagcgatgaaaacgtttcagtttgctcatggaaaacggtgtaacaagggtgaacactatcccatatcaccagctcaccgtctttcattgccatacggaactccggatgagcattcatcaggcgggcaagaatgtgaataaaggccggataaaacttgtgcttatttttctttacggtctttaaaaaggccgtaatatccagctgaacggtctggttataggtacattgagcaactgactgaaatgcctcaaaatgttctttacgatgccattgggatatatcaacggtggtatatccagtgatttttttctccattttagcttccttagctcctgaaaatctcgataactcaaaaaatacgcccggtagtgatcttatttcattatggtgaaagttggaacctcttacgtgccgatcaacgtctcattttcgccaaaagttggcccagggcttcccggtatcaacagggacaccaggatttatttattctgcgaagtgatcttccgtcacaggtatttattcggcgcaaagtgcgtcgggtgatgctgccaacttactgatttagtgtatgatggtgtttttgaggtgctccagtggcttctgtttctatcagctgtccctcctgttcagctactgacggggtggtgcgtaacggcaaaagcaccgccggacatcagcgctagcggagtgtatactggcttactatgttggcactgatgagggtgtcagtgaagtgcttcatgtggcaggagaaaaaaggctgcaccggtgcgtcagcagaatatgtgatacaggatatattccgcttcctcgctcactgactcgctacgctcggtcgttcgactgcggcgagcggaaatggcttacgaacggggcggagatttcctggaagatgccaggaagatacttaacagggaagtgagagggccgcggcaaagccgtttttccataggctccgcccccctgacaagcatcacgaaatctgacgctcaaatcagtggtggcgaaacccgacaggactataaagataccaggcgtttcccctggcggctccctcgtgcgctctcctgttcctgcctttcggtttaccggtgtcattccgctgttatggccgcgtttgtctcattccacgcctgacactcagttccgggtaggcagttcgctccaagctggactgtatgcacgaaccccccgttcagtccgaccgctgcgccttatccggtaactatcgtcttgagtccaacccggaaagacatgcaaaagcaccactggcagcagccactggtaattgatttagaggagttagtcttgaagtcatgcgccggttaaggctaaactgaaaggacaagttttggtgactgcgctcctccaagccagttacctcggttcaaagagttggtagctcagagaaccttcgaaaaaccgccctgcaaggcggttttttcgttttcagagcaagagattacgcgcagaccaaaacgatctcaagaagatcatcttattaatcagataaaatatttctagatttcagtgcaatttatctcttcaaatgtagcacctgaagtcagccccatacgatataagttgtaattctcatgttagtcatgccccgcgcccaccggaaggagctgactgggttgaaggctctcaagggcatcggtcgagatcccggtgcctaatgagtgagctaacttacattaattgcgttgcgct

SEQ ID NO: 931 - DNA, 4197 bp, Synthetic construct
  source 1..4197: mol_type = other DNA
gcgggcgttatgtttccattgggaagtattgcattctgtttcttataaaagtatgatttgcatgcttttgatagggacaaataagtcgctgatcaaaaggagcttaacaggttgtcaagtccaatcggcacgccaccaaggcaagctgagcagatagacagcatgaactggaacagggtcttcatagatacctccacggttatagttatagcataatccatttctaacatgacgcggctagagttttaggactcgtggatggttgttttaacaacttggttaagccgaggtaaggcgtgaggaattgccgcagttctaagtctgcctcggttttgctagagattcttaatggactacaaagaccatgacggtgattataaagatcatgacatcgattacaaggatgacgatgacaagggaggaagcggatcgatgtcgtcaaataaacctctttggtatcgaagtcgcggttacctgcatttcgatctaccagttagcattaataaagctaaaaatctcgtaactaatcctgacttagtttccaagcatgctttctttccattaataagttatacagttgagtctaagaaaataagcaaaaacaaagatactcgaaaaatcgacgtagctgtaaagcagcgtccaatcgcttattcttcgcatatggacagccatatctatgcattctatgccaatcttttaagcaaaaagtatgaagctaagttgaaatcggcagggttgaccgagagtattctcgcatttagagggctcggtaaaagcaatatcgattttgcttttgaagcctttgaacaaattaaaactatgggtgaatgtagtgctgtcgcactcgatttttctaaattctttgatacgttagaccacgatttactaaagcaaagttgggcgaacttactaggcgagaaaaaattaccgtcagatcactttaatgtcttcaaatctattactaagttctcgcaagtaaataaagaagagttgtacaaagaatttggtatttcgccaaataatcctaaaaacggaagaaatagagtttgtactgctcaagagtttcgagatgttgtaaggaataagaaactcataaaaaccaataaaggctcgttcggtatacctcaaggttcccctatcagtgccttgctatcaaacatatatatgtttgagtttgacgcagagatgaaacggtatatggacattcacggtggtaaatactatcgctactgtgatgatatgcttttcattgttccagctcctttaagagacaaagtcgctggttatgcgcaagagcaagttaaaaatctaaaggtttcaattaaccctaagaaaactgagttgagaactttcagttctcaaggtggtatcttagttgctgaccaaatgcttcaataccttggttttatgtttgacggtgagaacgtgtatatccgttcctcttcattagctcgatactcagaaaaaatgaaaagaggtattcgtttagctaagaaaaccatggataagtacaatgctgttcgtgtagctaaaggtttgcctgagaaatcattgtataagcgtaaactgtatagtcgctacactcatttaggcggcagaaattttgttacgtatggtttacgggctgcaagtgcaatgcagagtaaaaccattaagcgtcaactgaaacctctttggcgccggtttcatgaggaactcgaaaaagaaacataacaaatgcctcaagagggactgtcaacgcgcggcgtttccagtcccattgagccgcggtggttacggttgttgtgtttgagtttttagtgttatgcgttgccagccccttaggcgggcgttagctgtatacgatgaacaaggaagtaatagcaataactagcataaccccttggggcctctaaacgggtcttgaggggttttttgctgaaacctcaggcatttgagaagcacacggtcacactgcttccggtagtcaataaaccggtaaaccagcaatagacataagcggctatttaacgaccctgccctgaaccgacgaccgggtcgaatttgctttcgaatttctgccattcatccgcttattatcacttattcaggcgtagcaccaggcgtttaagggcaccaataactgccttaaaaaaattacgccccgccctgccactcatcgcagtactgttgtaattcattaagcattctgccgacatggaagccatcacagacggcatgatgaacctgaatcgccagcggcatcagcaccttgtcgccttgcgtataatatttgcccatagtgaaaacgggggcgaagaagttgtccatattggccacgtttaaatcaaaactggtgaaactcacccagggattggctgagacgaaaaacatattctcaataaaccctttagggaaataggccaggttttcaccgtaacacgccacatcttgcgaatatatgtgtagaaactgccggaaatcgtcgtggtattcactccagagcgatgaaaacgtttcagtttgctcatggaaaacggtgtaacaagggtgaacactatcccatatcaccagctcaccgtctttcattgccatacggaactccggatgagcattcatcaggcgggcaagaatgtgaataaaggccggataaaacttgtgcttatttttctttacggtctttaaaaaggccgtaatatccagctgaacggtctggttataggtacattgagcaactgactgaaatgcctcaaaatgttctttacgatgccattgggatatatcaacggtggtatatccagtgatttttttctccattttagcttccttagctcctgaaaatctcgataactcaaaaaatacgcccggtagtgatcttatttcattatggtgaaagttggaacctcttacgtgccgatcaacgtctcattttcgccaaaagttggcccagggcttcccggtatcaacagggacaccaggatttatttattctgcgaagtgatcttccgtcacaggtatttattcggcgcaaagtgcgtcgggtgatgctgccaacttactgatttagtgtatgatggtgtttttgaggtgctccagtggcttctgtttctatcagctgtccctcctgttcagctactgacggggtggtgcgtaacggcaaaagcaccgccggacatcagcgctagcggagtgtatactggcttactatgttggcactgatgagggtgtcagtgaagtgcttcatgtggcaggagaaaaaaggctgcaccggtgcgtcagcagaatatgtgatacaggatatattccgcttcctcgctcactgactcgctacgctcggtcgttcgactgcggcgagcggaaatggcttacgaacggggcggagatttcctggaagatgccaggaagatacttaacagggaagtgagagggccgcggcaaagccgtttttccataggctccgcccccctgacaagcatcacgaaatctgacgctcaaatcagtggtggcgaaacccgacaggactataaagataccaggcgtttcccctggcggctccctcgtgcgctctcctgttcctgcctttcggtttaccggtgtcattccgctgttatggccgcgtttgtctcattccacgcctgacactcagttccgggtaggcagttcgctccaagctggactgtatgcacgaaccccccgttcagtccgaccgctgcgccttatccggtaactatcgtcttgagtccaacccggaaagacatgcaaaagcaccactggcagcagccactggtaattgatttagaggagttagtcttgaagtcatgcgccggttaaggctaaactgaaaggacaagttttggtgactgcgctcctccaagccagttacctcggttcaaagagttggtagctcagagaaccttcgaaaaaccgccctgcaaggcggttttttcgttttcagagcaagagattacgcgcagaccaaaacgatctcaagaagatcatcttattaatcagataaaatatttctagatttcagtgcaatttatctcttcaaatgtagcacctgaagtcagccccatacgatataagttgtaattctcatgttagtcatgccccgcgcccaccggaaggagctgactgggttgaaggctctcaagggcatcggtcgagatcccggtgcctaatgagtgagctaacttacattaattgcgttgcgct

SEQ ID NO: 932 - DNA, 4295 bp, Synthetic construct
  source 1..4295: mol_type = other DNA
ttgagatcttgtctataatcagggcttcagtcaggtgccagacgcggacaatactatctatctcagagttgtacttgaaacataataaatgttataaattcactgccctacgcatcggcgtaggggtgatgtacagtttgtcaactcccggccagcgaccttcgctgaacaccgaccagaggctgactagcaggtggatgatattcattattgtctccattatactgattacattatacagtgtttctaacatttgcggtgaaatgcacttttggactacaagtagtccattgtgtatgagaaggttggataaagaccactttgttaagccggggcaatgtattttgaacgaccgcagttcaaaattgccccggtttcacaatttttgagaacttacaaaatggactacaaagaccatgacggtgattataaagatcatgacatcgattacaaggatgacgatgacaagggaggaagcggatcgatggaatcacgtgaacacccatggtatagacgacgtggctaccttcatttcgataaacctatttcgttagaacatgctttagacatagtgagcaatcctgacttgattgcgactcattcctttcttccttttattacgttcacatctgcttcctataaaataaaacaagacaaaagtactagcgccataaataaaatattgaaagaaagaccaatagcttattcatcgcatgtcgatagtcatatttattcttactatgcagcaattctcagtgaactttatgaaaatgagttgcgagctcacaatgtcagtaaaaatgtgctagcatttagaacgttaaataaaagtaacattaactttgcatatgaagcttttcaagaaataaaaatcagaggtaactgtagtgcagttgctttagacttgtctaagtttttcgatactattgatcatggttttctgaaagacgcatggtgcaaattacttgctacagataagttgcccgaagatcattatgctgtattcaaagcgatcaccaagtattcaaaggtcgataaaagtacaatatatgatttaatgggtattcctaaaaataatgctaaatatacaaagaaaacaagaaagcaaatatgcacctttgtagagttcagagataaagttagaaaaggtaagttaatagtctctaataaggctggatttggcatcccacaaggctcaccaattagcgcccttttatctaacatttatatgcttaattttgacattgagatggatgaatatgtttcatctttaggtggcgtatattttcgatactgcgacgatatgcttttcattgttcctacggacgaaaaaaataatattgctggtgaggcggagaaaagattaatcaagcttaaagtatcacttaacatcaaaaaaacagagattagagagttctcagtatctccaacaaagataagatgtgataaaccccttcagtatttaggttttttattcgatggtgaaaatatttttcttagatcatcatctttatcacgttactctgacaggatgaaaagcggtgtacgccttgcgaaagcaaccatgaagcgtaagaataaaataaggaaactaaaagggttatctaaaaaagaactttttaaagaaaaaatttatgcccgatatgctcacgtaggaaaacgaaattttttgacatacggatacagagcatcccgtataatgaattcgaactcaataagaaaacaattaaaacctctatgggaaagattacagaaagaaattagtaaataagaaattgctaatttaatcagtgtgtggcatccatcggttgaactcgctgctcatagcagccccgctctcaactgtgggcggttatgagcttaagaacttcttaaacataaccaaatagccttctcgttgtcccaccgctgaacaaacccgcacaaattgccgcctgacccgttgggcggcatcctttctgtagcaataactagcataaccccttggggcctctaaacgggtcttgaggggttttttgctgaaacctcaggcatttgagaagcacacggtcacactgcttccggtagtcaataaaccggtaaaccagcaatagacataagcggctatttaacgaccctgccctgaaccgacgaccgggtcgaatttgctttcgaatttctgccattcatccgcttattatcacttattcaggcgtagcaccaggcgtttaagggcaccaataactgccttaaaaaaattacgccccgccctgccactcatcgcagtactgttgtaattcattaagcattctgccgacatggaagccatcacagacggcatgatgaacctgaatcgccagcggcatcagcaccttgtcgccttgcgtataatatttgcccatagtgaaaacgggggcgaagaagttgtccatattggccacgtttaaatcaaaactggtgaaactcacccagggattggctgagacgaaaaacatattctcaataaaccctttagggaaataggccaggttttcaccgtaacacgccacatcttgcgaatatatgtgtagaaactgccggaaatcgtcgtggtattcactccagagcgatgaaaacgtttcagtttgctcatggaaaacggtgtaacaagggtgaacactatcccatatcaccagctcaccgtctttcattgccatacggaactccggatgagcattcatcaggcgggcaagaatgtgaataaaggccggataaaacttgtgcttatttttctttacggtctttaaaaaggccgtaatatccagctgaacggtctggttataggtacattgagcaactgactgaaatgcctcaaaatgttctttacgatgccattgggatatatcaacggtggtatatccagtgatttttttctccattttagcttccttagctcctgaaaatctcgataactcaaaaaatacgcccggtagtgatcttatttcattatggtgaaagttggaacctcttacgtgccgatcaacgtctcattttcgccaaaagttggcccagggcttcccggtatcaacagggacaccaggatttatttattctgcgaagtgatcttccgtcacaggtatttattcggcgcaaagtgcgtcgggtgatgctgccaacttactgatttagtgtatgatggtgtttttgaggtgctccagtggcttctgtttctatcagctgtccctcctgttcagctactgacggggtggtgcgtaacggcaaaagcaccgccggacatcagcgctagcggagtgtatactggcttactatgttggcactgatgagggtgtcagtgaagtgcttcatgtggcaggagaaaaaaggctgcaccggtgcgtcagcagaatatgtgatacaggatatattccgcttcctcgctcactgactcgctacgctcggtcgttcgactgcggcgagcggaaatggcttacgaacggggcggagatttcctggaagatgccaggaagatacttaacagggaagtgagagggccgcggcaaagccgtttttccataggctccgcccccctgacaagcatcacgaaatctgacgctcaaatcagtggtggcgaaacccgacaggactataaagataccaggcgtttcccctggcggctccctcgtgcgctctcctgttcctgcctttcggtttaccggtgtcattccgctgttatggccgcgtttgtctcattccacgcctgacactcagttccgggtaggcagttcgctccaagctggactgtatgcacgaaccccccgttcagtccgaccgctgcgccttatccggtaactatcgtcttgagtccaacccggaaagacatgcaaaagcaccactggcagcagccactggtaattgatttagaggagttagtcttgaagtcatgcgccggttaaggctaaactgaaaggacaagttttggtgactgcgctcctccaagccagttacctcggttcaaagagttggtagctcagagaaccttcgaaaaaccgccctgcaaggcggttttttcgttttcagagcaagagattacgcgcagaccaaaacgatctcaagaagatcatcttattaatcagataaaatatttctagatttcagtgcaatttatctcttcaaatgtagcacctgaagtcagccccatacgatataagttgtaattctcatgttagtcatgccccgcgcccaccggaaggagctgactgggttgaaggctctcaagggcatcggtcgagatcccggtgcctaatgagtgagctaacttacattaattgcgttgcgct

SEQ ID NO: 933 - DNA, 4698 bp, Synthetic construct
  source 1..4698: mol_type = other DNA
gtttatattcaagtggttataatttatagaataaagaaagaataaaaaaagataaaaagaatagatcccagccctgtgtataactcactactttagtcagttccgcagtattacaaaaggatgtcgcaaacgctgtttgctcctctacaaaacagaccttaaaaccctaaaggcttaagtagcaccctcgcaagctcgggcaaatcgctgaatattccttttgtctccgaccatcaggcacctgagtcgctgtctttttcgtgacattcagttcgctgcgctcacggctctggcagtgaatgggggtaaatggcactacaggcgccttttatggattcatgcaaggaaactacccataatacaagaaaagcccgtcacgggcttctcagggcgttttatggcgggtctgctatgtggtgctatctgactttttgctgttcagcagttcctgccctctgattttccagtctgaccacttcggattatcccgtgacaggtcattcagactggctaatgcacccagtaaggcagcggtatcatcaacaggcttacccgtcttactgtccctagtgcttggattctcaccaataaaaaacgcccggcggcaaccgagcgttctgaacaaatccagatggagttctgaggtcattactggatctatcaacaggagtccaagcgagctctcgaaccccagagtcccgctcagaagaactcgtcaagaaggcgatagaaggcgatgcgctgcgaatcgggagcggcgataccgtaaagcacgaggaagcggtcagcccattcgccgccaagctcttcagcaatatcacgggtagccaacgctatgtcctgatagcggtccgccacacccagccggccacagtcgatgaatccagaaaagcggccattttccaccatgatattcggcaagcaggcatcgccatgggtcacgacgagatcctcgccgtcgggcatgcgcgccttgagcctggcgaacagttcggctggcgcgagcccctgatgctcttcgtccagatcatcctgatcgacaagaccggcttccatccgagtacgtgctcgctcgatgcgatgtttcgcttggtggtcgaatgggcaggtagccggatcaagcgtatgcagccgccgcattgcatcagccatgatggatactttctcggcaggagcaaggtgagatgacaggagatcctgccccggcacttcgcccaatagcagccagtcccttcccgcttcagtgacaacgtcgagcacagctgcgcaaggaacgcccgtcgtggccagccacgatagccgcgctgcctcgtcctgcagttcattcagggcaccggacaggtcggtcttgacaaaaagaaccgggcgcccctgcgctgacagccggaacacggcggcatcagagcagccgattgtctgttgtgcccagtcatagccgaatagcctctccacccaagcggccggagaacctgcgtgcaatccatcttgttcaatcatactcttcctttttcaatattattgaagcatttatcagggttattgtctcatgagcggatacatatttgaatgtatttagaaaaataaacaaataggggttccgcgcacatttccccgaaaagtgccacctgacgtctaagaaaccattattatcatgacattaacctataaaaataggcgtatcacgaggcagaatttcagataaaaaaaatccttagctttcgctaaggatgatttctggaattctaaagatctttgacagctagttatgacaacttgacggctacatcattcactttttcttcacaaccggcacggaactcgctcgggctggccccggtgcattttttaaatacccgcgagaagtagagttgatcgtcaaaaccaacattgcgaccgacggtggcgataggcatccgggtggtgctcaaaagcagcttcgcctggctgatacgttggtcctcgcgccagcttaagacgctaatccctaactgctggcggaaaagatgtgacagacgcgacggcgacaagcaaacatgctgtgcgacgctggcgatatcaaaattgctgtctgccaggtgatcgctgatgtactgacaagcctcgcgtacccgattatccatcggtggatggagcgactcgttaatcgcttccatgcgccgcagtaacaattgctcaagcagatttatcgccagcagctccgaatagcgcccttccccttgcccggcgttaatgatttgcccaaacaggtcgctgaaatgcggctggtgcgcttcatccgggcgaaagaaccccgtattggcaaatattgacggccagttaagccattcatgccagtaggcgcgcggacgaaagtaaacccactggtgataccattcgcgagcctccggatgacgaccgtagtgatgaatctctcctggcgggaacagcaaaatatcacccggtcggcaaacaaattctcgtccctgatttttcaccaccccctgaccgcgaatggtgagattgagaatataacctttcattcccagcggtcggtcgataaaaaaatcgagataaccgttggcctcaatcggcgttaaacccgccaccagatgggcattaaacgagtatcccggcagcaggggatcattttgcgcttcagccatacttttcatactcccgccattcagagaagaaaccaattgtccatattgcatcagacattgccgtcactgcgtcttttactggctcttctcgctaaccaaaccggtaaccccgcttattaaaagcattctgtaacaaagcgggaccaaagccatgacaaaaacgcgtaacaaaagtgtctataatcacggcagaaaagtccacattgattatttgcacggcgtcacactttgctatgccatagcatttttatccataagattagcggatcctacctgacgctttttatcgcaactctctactgtttctccatacccgttttttgggctaacaggaggaattaacgatatcggtgataccagcatcgtcttgatgcccttggcagcaccctgctaaggaggtaacaacaagatgacagaagttttattttatgtactatcagcgctgcgcttaagctcctggtctggtttcgcttggctggacaacctgttggagatgcagtaccacggcagcattatcgtggaagttcgttaactaggtataatactagctgagaccagtgactactggtctcagttttagagctagaaatagcaagttaaaataaggctagtccgttatcaacttgaaaaagtggcaccgagtcggtgctttttttataaaacgaaaggctcagtcgaaagactgggcctttcgttttatccgaatacgggttcttgcatgttacattgtcgatctgttcatggtgaacagctttaaatgcaccaaaaactcgtaaaagctctgatgtatctatcttttttacaccgttttcatctgtgcatatggacagttttccctttgatatctaacggtgaacagttgttctacttttgtttgttagtcttgatgcttcactgatagatacaagagccataagaacctcagatccttccgtatttagccagtatgttctctagtgtggttcgttgtttttgcgtgagccatgagaacgaaccattgagatcatgcttactttgcatgtcactcaaaaattttgcctcaaaactggtgagctgaatttttgcagttaaagcatcgtgtagtgtttttcttagtccgttacgtaggtaggaatctgatgtaatggttgttggtattttgtcaccattcatttttatctggttgttctcaagttcggttacgagatccatttgtctatctagttcaacttggaaaatcaacgtatcagtcgggcggcctcgcttatcaaccaccaatttcatattgctgtaagtgtttaaatctttacttattggtttcaaaacccattggttaagccttttaaactcatggtagttattttcaagcattaacatgaacttaaattcatcaaggctaatctctatatttgccttgtgagttttcttttgtgttagttcttttaataaccactcataaatcctcatagagtatttgttttcaaaagacttaacatgttccagattatattttatgaatttttttaactggaaaagataaggcaatatctcttcactaaaaactaattctaatttttcgcttgagaacttggcatagtttgtccactggaaaatctcaaagcctttaaccaaaggattcctgatttccacagttctcgtcatcagctctctggttgctttagctaatacaccataagcattttccctactgatgttcatcatctgagcgtattggttataagtgaacgataccgtccgttctttccttgtagggttttcaatcgtggggttgagtagtgccacacagcataaaattagcttggtttcatgctccgttaagtcatagcgactaatcgctagttcatttgctttgaaaacaactaattcagacatacatctcaattggtctaggtgattttaatcactataccaattgagatgggctagtcaatgataattactagtccttttcccgggagatctgggtatctgtaaattctgctagacctttgctggaaaacttgtaaattctgctagaccctctgtaaattccgctagacctttgtgtgtttttttt

SEQ ID NO: 934 - DNA, 4710 bp, Synthetic construct
  source 1..4710: mol_type = other DNA
gtttatattcaagtggttataatttatagaataaagaaagaataaaaaaagataaaaagaatagatcccagccctgtgtataactcactactttagtcagttccgcagtattacaaaaggatgtcgcaaacgctgtttgctcctctacaaaacagaccttaaaaccctaaaggcttaagtagcaccctcgcaagctcgggcaaatcgctgaatattccttttgtctccgaccatcaggcacctgagtcgctgtctttttcgtgacattcagttcgctgcgctcacggctctggcagtgaatgggggtaaatggcactacaggcgccttttatggattcatgcaaggaaactacccataatacaagaaaagcccgtcacgggcttctcagggcgttttatggcgggtctgctatgtggtgctatctgactttttgctgttcagcagttcctgccctctgattttccagtctgaccacttcggattatcccgtgacaggtcattcagactggctaatgcacccagtaaggcagcggtatcatcaacaggcttacccgtcttactgtccctagtgcttggattctcaccaataaaaaacgcccggcggcaaccgagcgttctgaacaaatccagatggagttctgaggtcattactggatctatcaacaggagtccaagcgagctctcgaaccccagagtcccgctcagaagaactcgtcaagaaggcgatagaaggcgatgcgctgcgaatcgggagcggcgataccgtaaagcacgaggaagcggtcagcccattcgccgccaagctcttcagcaatatcacgggtagccaacgctatgtcctgatagcggtccgccacacccagccggccacagtcgatgaatccagaaaagcggccattttccaccatgatattcggcaagcaggcatcgccatgggtcacgacgagatcctcgccgtcgggcatgcgcgccttgagcctggcgaacagttcggctggcgcgagcccctgatgctcttcgtccagatcatcctgatcgacaagaccggcttccatccgagtacgtgctcgctcgatgcgatgtttcgcttggtggtcgaatgggcaggtagccggatcaagcgtatgcagccgccgcattgcatcagccatgatggatactttctcggcaggagcaaggtgagatgacaggagatcctgccccggcacttcgcccaatagcagccagtcccttcccgcttcagtgacaacgtcgagcacagctgcgcaaggaacgcccgtcgtggccagccacgatagccgcgctgcctcgtcctgcagttcattcagggcaccggacaggtcggtcttgacaaaaagaaccgggcgcccctgcgctgacagccggaacacggcggcatcagagcagccgattgtctgttgtgcccagtcatagccgaatagcctctccacccaagcggccggagaacctgcgtgcaatccatcttgttcaatcatactcttcctttttcaatattattgaagcatttatcagggttattgtctcatgagcggatacatatttgaatgtatttagaaaaataaacaaataggggttccgcgcacatttccccgaaaagtgccacctgacgtctaagaaaccattattatcatgacattaacctataaaaataggcgtatcacgaggcagaatttcagataaaaaaaatccttagctttcgctaaggatgatttctggaattctaaagatctttgacagctagttatgacaacttgacggctacatcattcactttttcttcacaaccggcacggaactcgctcgggctggccccggtgcattttttaaatacccgcgagaagtagagttgatcgtcaaaaccaacattgcgaccgacggtggcgataggcatccgggtggtgctcaaaagcagcttcgcctggctgatacgttggtcctcgcgccagcttaagacgctaatccctaactgctggcggaaaagatgtgacagacgcgacggcgacaagcaaacatgctgtgcgacgctggcgatatcaaaattgctgtctgccaggtgatcgctgatgtactgacaagcctcgcgtacccgattatccatcggtggatggagcgactcgttaatcgcttccatgcgccgcagtaacaattgctcaagcagatttatcgccagcagctccgaatagcgcccttccccttgcccggcgttaatgatttgcccaaacaggtcgctgaaatgcggctggtgcgcttcatccgggcgaaagaaccccgtattggcaaatattgacggccagttaagccattcatgccagtaggcgcgcggacgaaagtaaacccactggtgataccattcgcgagcctccggatgacgaccgtagtgatgaatctctcctggcgggaacagcaaaatatcacccggtcggcaaacaaattctcgtccctgatttttcaccaccccctgaccgcgaatggtgagattgagaatataacctttcattcccagcggtcggtcgataaaaaaatcgagataaccgttggcctcaatcggcgttaaacccgccaccagatgggcattaaacgagtatcccggcagcaggggatcattttgcgcttcagccatacttttcatactcccgccattcagagaagaaaccaattgtccatattgcatcagacattgccgtcactgcgtcttttactggctcttctcgctaaccaaaccggtaaccccgcttattaaaagcattctgtaacaaagcgggaccaaagccatgacaaaaacgcgtaacaaaagtgtctataatcacggcagaaaagtccacattgattatttgcacggcgtcacactttgctatgccatagcatttttatccataagattagcggatcctacctgacgctttttatcgcaactctctactgtttctccatacccgttttttgggctaacaggaggaattaacgatatcggtgataccagcatcgtcttgatgcccttggcagcaccctgctaaggaggtaacaacaagatgagaatatcaattagggctctattagcagcgctgttggttaccttgggctacttcacgtgcggtgctgcaatgggtctggacagcctgttaggcagcacctataacgtgtccgtgaccctgggtgttccgtaactaggtataatactagctgagaccagtgactactggtctcagttttagagctagaaatagcaagttaaaataaggctagtccgttatcaacttgaaaaagtggcaccgagtcggtgctttttttataaaacgaaaggctcagtcgaaagactgggcctttcgttttatccgaatacgggttcttgcatgttacattgtcgatctgttcatggtgaacagctttaaatgcaccaaaaactcgtaaaagctctgatgtatctatcttttttacaccgttttcatctgtgcatatggacagttttccctttgatatctaacggtgaacagttgttctacttttgtttgttagtcttgatgcttcactgatagatacaagagccataagaacctcagatccttccgtatttagccagtatgttctctagtgtggttcgttgtttttgcgtgagccatgagaacgaaccattgagatcatgcttactttgcatgtcactcaaaaattttgcctcaaaactggtgagctgaatttttgcagttaaagcatcgtgtagtgtttttcttagtccgttacgtaggtaggaatctgatgtaatggttgttggtattttgtcaccattcatttttatctggttgttctcaagttcggttacgagatccatttgtctatctagttcaacttggaaaatcaacgtatcagtcgggcggcctcgcttatcaaccaccaatttcatattgctgtaagtgtttaaatctttacttattggtttcaaaacccattggttaagccttttaaactcatggtagttattttcaagcattaacatgaacttaaattcatcaaggctaatctctatatttgccttgtgagttttcttttgtgttagttcttttaataaccactcataaatcctcatagagtatttgttttcaaaagacttaacatgttccagattatattttatgaatttttttaactggaaaagataaggcaatatctcttcactaaaaactaattctaatttttcgcttgagaacttggcatagtttgtccactggaaaatctcaaagcctttaaccaaaggattcctgatttccacagttctcgtcatcagctctctggttgctttagctaatacaccataagcattttccctactgatgttcatcatctgagcgtattggttataagtgaacgataccgtccgttctttccttgtagggttttcaatcgtggggttgagtagtgccacacagcataaaattagcttggtttcatgctccgttaagtcatagcgactaatcgctagttcatttgctttgaaaacaactaattcagacatacatctcaattggtctaggtgattttaatcactataccaattgagatgggctagtcaatgataattactagtccttttcccgggagatctgggtatctgtaaattctgctagacctttgctggaaaacttgtaaattctgctagaccctctgtaaattccgctagacctttgtgtgtttttttt

SEQ ID NO: 935 - DNA, 4689 bp, Synthetic construct
  source 1..4689: mol_type = other DNA
gtttatattcaagtggttataatttatagaataaagaaagaataaaaaaagataaaaagaatagatcccagccctgtgtataactcactactttagtcagttccgcagtattacaaaaggatgtcgcaaacgctgtttgctcctctacaaaacagaccttaaaaccctaaaggcttaagtagcaccctcgcaagctcgggcaaatcgctgaatattccttttgtctccgaccatcaggcacctgagtcgctgtctttttcgtgacattcagttcgctgcgctcacggctctggcagtgaatgggggtaaatggcactacaggcgccttttatggattcatgcaaggaaactacccataatacaagaaaagcccgtcacgggcttctcagggcgttttatggcgggtctgctatgtggtgctatctgactttttgctgttcagcagttcctgccctctgattttccagtctgaccacttcggattatcccgtgacaggtcattcagactggctaatgcacccagtaaggcagcggtatcatcaacaggcttacccgtcttactgtccctagtgcttggattctcaccaataaaaaacgcccggcggcaaccgagcgttctgaacaaatccagatggagttctgaggtcattactggatctatcaacaggagtccaagcgagctctcgaaccccagagtcccgctcagaagaactcgtcaagaaggcgatagaaggcgatgcgctgcgaatcgggagcggcgataccgtaaagcacgaggaagcggtcagcccattcgccgccaagctcttcagcaatatcacgggtagccaacgctatgtcctgatagcggtccgccacacccagccggccacagtcgatgaatccagaaaagcggccattttccaccatgatattcggcaagcaggcatcgccatgggtcacgacgagatcctcgccgtcgggcatgcgcgccttgagcctggcgaacagttcggctggcgcgagcccctgatgctcttcgtccagatcatcctgatcgacaagaccggcttccatccgagtacgtgctcgctcgatgcgatgtttcgcttggtggtcgaatgggcaggtagccggatcaagcgtatgcagccgccgcattgcatcagccatgatggatactttctcggcaggagcaaggtgagatgacaggagatcctgccccggcacttcgcccaatagcagccagtcccttcccgcttcagtgacaacgtcgagcacagctgcgcaaggaacgcccgtcgtggccagccacgatagccgcgctgcctcgtcctgcagttcattcagggcaccggacaggtcggtcttgacaaaaagaaccgggcgcccctgcgctgacagccggaacacggcggcatcagagcagccgattgtctgttgtgcccagtcatagccgaatagcctctccacccaagcggccggagaacctgcgtgcaatccatcttgttcaatcatactcttcctttttcaatattattgaagcatttatcagggttattgtctcatgagcggatacatatttgaatgtatttagaaaaataaacaaataggggttccgcgcacatttccccgaaaagtgccacctgacgtctaagaaaccattattatcatgacattaacctataaaaataggcgtatcacgaggcagaatttcagataaaaaaaatccttagctttcgctaaggatgatttctggaattctaaagatctttgacagctagttatgacaacttgacggctacatcattcactttttcttcacaaccggcacggaactcgctcgggctggccccggtgcattttttaaatacccgcgagaagtagagttgatcgtcaaaaccaacattgcgaccgacggtggcgataggcatccgggtggtgctcaaaagcagcttcgcctggctgatacgttggtcctcgcgccagcttaagacgctaatccctaactgctggcggaaaagatgtgacagacgcgacggcgacaagcaaacatgctgtgcgacgctggcgatatcaaaattgctgtctgccaggtgatcgctgatgtactgacaagcctcgcgtacccgattatccatcggtggatggagcgactcgttaatcgcttccatgcgccgcagtaacaattgctcaagcagatttatcgccagcagctccgaatagcgcccttccccttgcccggcgttaatgatttgcccaaacaggtcgctgaaatgcggctggtgcgcttcatccgggcgaaagaaccccgtattggcaaatattgacggccagttaagccattcatgccagtaggcgcgcggacgaaagtaaacccactggtgataccattcgcgagcctccggatgacgaccgtagtgatgaatctctcctggcgggaacagcaaaatatcacccggtcggcaaacaaattctcgtccctgatttttcaccaccccctgaccgcgaatggtgagattgagaatataacctttcattcccagcggtcggtcgataaaaaaatcgagataaccgttggcctcaatcggcgttaaacccgccaccagatgggcattaaacgagtatcccggcagcaggggatcattttgcgcttcagccatacttttcatactcccgccattcagagaagaaaccaattgtccatattgcatcagacattgccgtcactgcgtcttttactggctcttctcgctaaccaaaccggtaaccccgcttattaaaagcattctgtaacaaagcgggaccaaagccatgacaaaaacgcgtaacaaaagtgtctataatcacggcagaaaagtccacattgattatttgcacggcgtcacactttgctatgccatagcatttttatccataagattagcggatcctacctgacgctttttatcgcaactctctactgtttctccatacccgttttttgggctaacaggaggaattaacgatatcggtgataccagcatcgtcttgatgcccttggcagcaccctgctaaggaggtaacaacaagatggtaatactaaggtttatgacaatgtgtttgagctggctgtgtaaggacaaaggtattgataatctgctggagatgatctataacgtgatctgcgacggcgattacacctaactaggtataatactagctgagaccagtgactactggtctcagttttagagctagaaatagcaagttaaaataaggctagtccgttatcaacttgaaaaagtggcaccgagtcggtgctttttttataaaacgaaaggctcagtcgaaagactgggcctttcgttttatccgaatacgggttcttgcatgttacattgtcgatctgttcatggtgaacagctttaaatgcaccaaaaactcgtaaaagctctgatgtatctatcttttttacaccgttttcatctgtgcatatggacagttttccctttgatatctaacggtgaacagttgttctacttttgtttgttagtcttgatgcttcactgatagatacaagagccataagaacctcagatccttccgtatttagccagtatgttctctagtgtggttcgttgtttttgcgtgagccatgagaacgaaccattgagatcatgcttactttgcatgtcactcaaaaattttgcctcaaaactggtgagctgaatttttgcagttaaagcatcgtgtagtgtttttcttagtccgttacgtaggtaggaatctgatgtaatggttgttggtattttgtcaccattcatttttatctggttgttctcaagttcggttacgagatccatttgtctatctagttcaacttggaaaatcaacgtatcagtcgggcggcctcgcttatcaaccaccaatttcatattgctgtaagtgtttaaatctttacttattggtttcaaaacccattggttaagccttttaaactcatggtagttattttcaagcattaacatgaacttaaattcatcaaggctaatctctatatttgccttgtgagttttcttttgtgttagttcttttaataaccactcataaatcctcatagagtatttgttttcaaaagacttaacatgttccagattatattttatgaatttttttaactggaaaagataaggcaatatctcttcactaaaaactaattctaatttttcgcttgagaacttggcatagtttgtccactggaaaatctcaaagcctttaaccaaaggattcctgatttccacagttctcgtcatcagctctctggttgctttagctaatacaccataagcattttccctactgatgttcatcatctgagcgtattggttataagtgaacgataccgtccgttctttccttgtagggttttcaatcgtggggttgagtagtgccacacagcataaaattagcttggtttcatgctccgttaagtcatagcgactaatcgctagttcatttgctttgaaaacaactaattcagacatacatctcaattggtctaggtgattttaatcactataccaattgagatgggctagtcaatgataattactagtccttttcccgggagatctgggtatctgtaaattctgctagacctttgctggaaaacttgtaaattctgctagaccctctgtaaattccgctagacctttgtgtgtttttttt

SEQ ID NO: 936 - DNA, 4698 bp, Synthetic construct
  source 1..4698: mol_type = other DNA
gtttatattcaagtggttataatttatagaataaagaaagaataaaaaaagataaaaagaatagatcccagccctgtgtataactcactactttagtcagttccgcagtattacaaaaggatgtcgcaaacgctgtttgctcctctacaaaacagaccttaaaaccctaaaggcttaagtagcaccctcgcaagctcgggcaaatcgctgaatattccttttgtctccgaccatcaggcacctgagtcgctgtctttttcgtgacattcagttcgctgcgctcacggctctggcagtgaatgggggtaaatggcactacaggcgccttttatggattcatgcaaggaaactacccataatacaagaaaagcccgtcacgggcttctcagggcgttttatggcgggtctgctatgtggtgctatctgactttttgctgttcagcagttcctgccctctgattttccagtctgaccacttcggattatcccgtgacaggtcattcagactggctaatgcacccagtaaggcagcggtatcatcaacaggcttacccgtcttactgtccctagtgcttggattctcaccaataaaaaacgcccggcggcaaccgagcgttctgaacaaatccagatggagttctgaggtcattactggatctatcaacaggagtccaagcgagctctcgaaccccagagtcccgctcagaagaactcgtcaagaaggcgatagaaggcgatgcgctgcgaatcgggagcggcgataccgtaaagcacgaggaagcggtcagcccattcgccgccaagctcttcagcaatatcacgggtagccaacgctatgtcctgatagcggtccgccacacccagccggccacagtcgatgaatccagaaaagcggccattttccaccatgatattcggcaagcaggcatcgccatgggtcacgacgagatcctcgccgtcgggcatgcgcgccttgagcctggcgaacagttcggctggcgcgagcccctgatgctcttcgtccagatcatcctgatcgacaagaccggcttccatccgagtacgtgctcgctcgatgcgatgtttcgcttggtggtcgaatgggcaggtagccggatcaagcgtatgcagccgccgcattgcatcagccatgatggatactttctcggcaggagcaaggtgagatgacaggagatcctgccccggcacttcgcccaatagcagccagtcccttcccgcttcagtgacaacgtcgagcacagctgcgcaaggaacgcccgtcgtggccagccacgatagccgcgctgcctcgtcctgcagttcattcagggcaccggacaggtcggtcttgacaaaaagaaccgggcgcccctgcgctgacagccggaacacggcggcatcagagcagccgattgtctgttgtgcccagtcatagccgaatagcctctccacccaagcggccggagaacctgcgtgcaatccatcttgttcaatcatactcttcctttttcaatattattgaagcatttatcagggttattgtctcatgagcggatacatatttgaatgtatttagaaaaataaacaaataggggttccgcgcacatttccccgaaaagtgccacctgacgtctaagaaaccattattatcatgacattaacctataaaaataggcgtatcacgaggcagaatttcagataaaaaaaatccttagctttcgctaaggatgatttctggaattctaaagatctttgacagctagttatgacaacttgacggctacatcattcactttttcttcacaaccggcacggaactcgctcgggctggccccggtgcattttttaaatacccgcgagaagtagagttgatcgtcaaaaccaacattgcgaccgacggtggcgataggcatccgggtggtgctcaaaagcagcttcgcctggctgatacgttggtcctcgcgccagcttaagacgctaatccctaactgctggcggaaaagatgtgacagacgcgacggcgacaagcaaacatgctgtgcgacgctggcgatatcaaaattgctgtctgccaggtgatcgctgatgtactgacaagcctcgcgtacccgattatccatcggtggatggagcgactcgttaatcgcttccatgcgccgcagtaacaattgctcaagcagatttatcgccagcagctccgaatagcgcccttccccttgcccggcgttaatgatttgcccaaacaggtcgctgaaatgcggctggtgcgcttcatccgggcgaaagaaccccgtattggcaaatattgacggccagttaagccattcatgccagtaggcgcgcggacgaaagtaaacccactggtgataccattcgcgagcctccggatgacgaccgtagtgatgaatctctcctggcgggaacagcaaaatatcacccggtcggcaaacaaattctcgtccctgatttttcaccaccccctgaccgcgaatggtgagattgagaatataacctttcattcccagcggtcggtcgataaaaaaatcgagataaccgttggcctcaatcggcgttaaacccgccaccagatgggcattaaacgagtatcccggcagcaggggatcattttgcgcttcagccatacttttcatactcccgccattcagagaagaaaccaattgtccatattgcatcagacattgccgtcactgcgtcttttactggctcttctcgctaaccaaaccggtaaccccgcttattaaaagcattctgtaacaaagcgggaccaaagccatgacaaaaacgcgtaacaaaagtgtctataatcacggcagaaaagtccacattgattatttgcacggcgtcacactttgctatgccatagcatttttatccataagattagcggatcctacctgacgctttttatcgcaactctctactgtttctccatacccgttttttgggctaacaggaggaattaacgatatcggtgataccagcatcgtcttgatgcccttggcagcaccctgctaaggaggtaacaacaagatgaaaacactattccaatttatgttatcaatctgcagcgcttgtctgggtggtgttccgattggcctggacaacttgctggaaatggattacgcgattacgatcaccgtcgaggtgtcctaactaggtataatactagctgagaccagtgactactggtctcagttttagagctagaaatagcaagttaaaataaggctagtccgttatcaacttgaaaaagtggcaccgagtcggtgctttttttataaaacgaaaggctcagtcgaaagactgggcctttcgttttatccgaatacgggttcttgcatgttacattgtcgatctgttcatggtgaacagctttaaatgcaccaaaaactcgtaaaagctctgatgtatctatcttttttacaccgttttcatctgtgcatatggacagttttccctttgatatctaacggtgaacagttgttctacttttgtttgttagtcttgatgcttcactgatagatacaagagccataagaacctcagatccttccgtatttagccagtatgttctctagtgtggttcgttgtttttgcgtgagccatgagaacgaaccattgagatcatgcttactttgcatgtcactcaaaaattttgcctcaaaactggtgagctgaatttttgcagttaaagcatcgtgtagtgtttttcttagtccgttacgtaggtaggaatctgatgtaatggttgttggtattttgtcaccattcatttttatctggttgttctcaagttcggttacgagatccatttgtctatctagttcaacttggaaaatcaacgtatcagtcgggcggcctcgcttatcaaccaccaatttcatattgctgtaagtgtttaaatctttacttattggtttcaaaacccattggttaagccttttaaactcatggtagttattttcaagcattaacatgaacttaaattcatcaaggctaatctctatatttgccttgtgagttttcttttgtgttagttcttttaataaccactcataaatcctcatagagtatttgttttcaaaagacttaacatgttccagattatattttatgaatttttttaactggaaaagataaggcaatatctcttcactaaaaactaattctaatttttcgcttgagaacttggcatagtttgtccactggaaaatctcaaagcctttaaccaaaggattcctgatttccacagttctcgtcatcagctctctggttgctttagctaatacaccataagcattttccctactgatgttcatcatctgagcgtattggttataagtgaacgataccgtccgttctttccttgtagggttttcaatcgtggggttgagtagtgccacacagcataaaattagcttggtttcatgctccgttaagtcatagcgactaatcgctagttcatttgctttgaaaacaactaattcagacatacatctcaattggtctaggtgattttaatcactataccaattgagatgggctagtcaatgataattactagtccttttcccgggagatctgggtatctgtaaattctgctagacctttgctggaaaacttgtaaattctgctagaccctctgtaaattccgctagacctttgtgtgtttttttt

SEQ ID NO: 937 - DNA, 4695 bp, Synthetic construct
  source 1..4695: mol_type = other DNA
gtttatattcaagtggttataatttatagaataaagaaagaataaaaaaagataaaaagaatagatcccagccctgtgtataactcactactttagtcagttccgcagtattacaaaaggatgtcgcaaacgctgtttgctcctctacaaaacagaccttaaaaccctaaaggcttaagtagcaccctcgcaagctcgggcaaatcgctgaatattccttttgtctccgaccatcaggcacctgagtcgctgtctttttcgtgacattcagttcgctgcgctcacggctctggcagtgaatgggggtaaatggcactacaggcgccttttatggattcatgcaaggaaactacccataatacaagaaaagcccgtcacgggcttctcagggcgttttatggcgggtctgctatgtggtgctatctgactttttgctgttcagcagttcctgccctctgattttccagtctgaccacttcggattatcccgtgacaggtcattcagactggctaatgcacccagtaaggcagcggtatcatcaacaggcttacccgtcttactgtccctagtgcttggattctcaccaataaaaaacgcccggcggcaaccgagcgttctgaacaaatccagatggagttctgaggtcattactggatctatcaacaggagtccaagcgagctctcgaaccccagagtcccgctcagaagaactcgtcaagaaggcgatagaaggcgatgcgctgcgaatcgggagcggcgataccgtaaagcacgaggaagcggtcagcccattcgccgccaagctcttcagcaatatcacgggtagccaacgctatgtcctgatagcggtccgccacacccagccggccacagtcgatgaatccagaaaagcggccattttccaccatgatattcggcaagcaggcatcgccatgggtcacgacgagatcctcgccgtcgggcatgcgcgccttgagcctggcgaacagttcggctggcgcgagcccctgatgctcttcgtccagatcatcctgatcgacaagaccggcttccatccgagtacgtgctcgctcgatgcgatgtttcgcttggtggtcgaatgggcaggtagccggatcaagcgtatgcagccgccgcattgcatcagccatgatggatactttctcggcaggagcaaggtgagatgacaggagatcctgccccggcacttcgcccaatagcagccagtcccttcccgcttcagtgacaacgtcgagcacagctgcgcaaggaacgcccgtcgtggccagccacgatagccgcgctgcctcgtcctgcagttcattcagggcaccggacaggtcggtcttgacaaaaagaaccgggcgcccctgcgctgacagccggaacacggcggcatcagagcagccgattgtctgttgtgcccagtcatagccgaatagcctctccacccaagcggccggagaacctgcgtgcaatccatcttgttcaatcatactcttcctttttcaatattattgaagcatttatcagggttattgtctcatgagcggatacatatttgaatgtatttagaaaaataaacaaataggggttccgcgcacatttccccgaaaagtgccacctgacgtctaagaaaccattattatcatgacattaacctataaaaataggcgtatcacgaggcagaatttcagataaaaaaaatccttagctttcgctaaggatgatttctggaattctaaagatctttgacagctagttatgacaacttgacggctacatcattcactttttcttcacaaccggcacggaactcgctcgggctggccccggtgcattttttaaatacccgcgagaagtagagttgatcgtcaaaaccaacattgcgaccgacggtggcgataggcatccgggtggtgctcaaaagcagcttcgcctggctgatacgttggtcctcgcgccagcttaagacgctaatccctaactgctggcggaaaagatgtgacagacgcgacggcgacaagcaaacatgctgtgcgacgctggcgatatcaaaattgctgtctgccaggtgatcgctgatgtactgacaagcctcgcgtacccgattatccatcggtggatggagcgactcgttaatcgcttccatgcgccgcagtaacaattgctcaagcagatttatcgccagcagctccgaatagcgcccttccccttgcccggcgttaatgatttgcccaaacaggtcgctgaaatgcggctggtgcgcttcatccgggcgaaagaaccccgtattggcaaatattgacggccagttaagccattcatgccagtaggcgcgcggacgaaagtaaacccactggtgataccattcgcgagcctccggatgacgaccgtagtgatgaatctctcctggcgggaacagcaaaatatcacccggtcggcaaacaaattctcgtccctgatttttcaccaccccctgaccgcgaatggtgagattgagaatataacctttcattcccagcggtcggtcgataaaaaaatcgagataaccgttggcctcaatcggcgttaaacccgccaccagatgggcattaaacgagtatcccggcagcaggggatcattttgcgcttcagccatacttttcatactcccgccattcagagaagaaaccaattgtccatattgcatcagacattgccgtcactgcgtcttttactggctcttctcgctaaccaaaccggtaaccccgcttattaaaagcattctgtaacaaagcgggaccaaagccatgacaaaaacgcgtaacaaaagtgtctataatcacggcagaaaagtccacattgattatttgcacggcgtcacactttgctatgccatagcatttttatccataagattagcggatcctacctgacgctttttatcgcaactctctactgtttctccatacccgttttttgggctaacaggaggaattaacgatatcggtgataccagcatcgtcttgatgcccttggcagcaccctgctaaggaggtaacaacaagatgaatattatacacttattggtatcactatggtccgtgttcagcgagggccgttggccgggtgttgacaagttgctggaaaccctgtacaacgtcatcagcattatggagacgatctaactaggtataatactagctgagaccagtgactactggtctcagttttagagctagaaatagcaagttaaaataaggctagtccgttatcaacttgaaaaagtggcaccgagtcggtgctttttttataaaacgaaaggctcagtcgaaagactgggcctttcgttttatccgaatacgggttcttgcatgttacattgtcgatctgttcatggtgaacagctttaaatgcaccaaaaactcgtaaaagctctgatgtatctatcttttttacaccgttttcatctgtgcatatggacagttttccctttgatatctaacggtgaacagttgttctacttttgtttgttagtcttgatgcttcactgatagatacaagagccataagaacctcagatccttccgtatttagccagtatgttctctagtgtggttcgttgtttttgcgtgagccatgagaacgaaccattgagatcatgcttactttgcatgtcactcaaaaattttgcctcaaaactggtgagctgaatttttgcagttaaagcatcgtgtagtgtttttcttagtccgttacgtaggtaggaatctgatgtaatggttgttggtattttgtcaccattcatttttatctggttgttctcaagttcggttacgagatccatttgtctatctagttcaacttggaaaatcaacgtatcagtcgggcggcctcgcttatcaaccaccaatttcatattgctgtaagtgtttaaatctttacttattggtttcaaaacccattggttaagccttttaaactcatggtagttattttcaagcattaacatgaacttaaattcatcaaggctaatctctatatttgccttgtgagttttcttttgtgttagttcttttaataaccactcataaatcctcatagagtatttgttttcaaaagacttaacatgttccagattatattttatgaatttttttaactggaaaagataaggcaatatctcttcactaaaaactaattctaatttttcgcttgagaacttggcatagtttgtccactggaaaatctcaaagcctttaaccaaaggattcctgatttccacagttctcgtcatcagctctctggttgctttagctaatacaccataagcattttccctactgatgttcatcatctgagcgtattggttataagtgaacgataccgtccgttctttccttgtagggttttcaatcgtggggttgagtagtgccacacagcataaaattagcttggtttcatgctccgttaagtcatagcgactaatcgctagttcatttgctttgaaaacaactaattcagacatacatctcaattggtctaggtgattttaatcactataccaattgagatgggctagtcaatgataattactagtccttttcccgggagatctgggtatctgtaaattctgctagacctttgctggaaaacttgtaaattctgctagaccctctgtaaattccgctagacctttgtgtgtttttttt

SEQ ID NO: 938 - DNA, 4818 bp, Synthetic construct
  source 1..4818: mol_type = other DNA
gtttatattcaagtggttataatttatagaataaagaaagaataaaaaaagataaaaagaatagatcccagccctgtgtataactcactactttagtcagttccgcagtattacaaaaggatgtcgcaaacgctgtttgctcctctacaaaacagaccttaaaaccctaaaggcttaagtagcaccctcgcaagctcgggcaaatcgctgaatattccttttgtctccgaccatcaggcacctgagtcgctgtctttttcgtgacattcagttcgctgcgctcacggctctggcagtgaatgggggtaaatggcactacaggcgccttttatggattcatgcaaggaaactacccataatacaagaaaagcccgtcacgggcttctcagggcgttttatggcgggtctgctatgtggtgctatctgactttttgctgttcagcagttcctgccctctgattttccagtctgaccacttcggattatcccgtgacaggtcattcagactggctaatgcacccagtaaggcagcggtatcatcaacaggcttacccgtcttactgtccctagtgcttggattctcaccaataaaaaacgcccggcggcaaccgagcgttctgaacaaatccagatggagttctgaggtcattactggatctatcaacaggagtccaagcgagctctcgaaccccagagtcccgctcagaagaactcgtcaagaaggcgatagaaggcgatgcgctgcgaatcgggagcggcgataccgtaaagcacgaggaagcggtcagcccattcgccgccaagctcttcagcaatatcacgggtagccaacgctatgtcctgatagcggtccgccacacccagccggccacagtcgatgaatccagaaaagcggccattttccaccatgatattcggcaagcaggcatcgccatgggtcacgacgagatcctcgccgtcgggcatgcgcgccttgagcctggcgaacagttcggctggcgcgagcccctgatgctcttcgtccagatcatcctgatcgacaagaccggcttccatccgagtacgtgctcgctcgatgcgatgtttcgcttggtggtcgaatgggcaggtagccggatcaagcgtatgcagccgccgcattgcatcagccatgatggatactttctcggcaggagcaaggtgagatgacaggagatcctgccccggcacttcgcccaatagcagccagtcccttcccgcttcagtgacaacgtcgagcacagctgcgcaaggaacgcccgtcgtggccagccacgatagccgcgctgcctcgtcctgcagttcattcagggcaccggacaggtcggtcttgacaaaaagaaccgggcgcccctgcgctgacagccggaacacggcggcatcagagcagccgattgtctgttgtgcccagtcatagccgaatagcctctccacccaagcggccggagaacctgcgtgcaatccatcttgttcaatcatactcttcctttttcaatattattgaagcatttatcagggttattgtctcatgagcggatacatatttgaatgtatttagaaaaataaacaaataggggttccgcgcacatttccccgaaaagtgccacctgacgtctaagaaaccattattatcatgacattaacctataaaaataggcgtatcacgaggcagaatttcagataaaaaaaatccttagctttcgctaaggatgatttctggaattctaaagatctttgacagctagttatgacaacttgacggctacatcattcactttttcttcacaaccggcacggaactcgctcgggctggccccggtgcattttttaaatacccgcgagaagtagagttgatcgtcaaaaccaacattgcgaccgacggtggcgataggcatccgggtggtgctcaaaagcagcttcgcctggctgatacgttggtcctcgcgccagcttaagacgctaatccctaactgctggcggaaaagatgtgacagacgcgacggcgacaagcaaacatgctgtgcgacgctggcgatatcaaaattgctgtctgccaggtgatcgctgatgtactgacaagcctcgcgtacccgattatccatcggtggatggagcgactcgttaatcgcttccatgcgccgcagtaacaattgctcaagcagatttatcgccagcagctccgaatagcgcccttccccttgcccggcgttaatgatttgcccaaacaggtcgctgaaatgcggctggtgcgcttcatccgggcgaaagaaccccgtattggcaaatattgacggccagttaagccattcatgccagtaggcgcgcggacgaaagtaaacccactggtgataccattcgcgagcctccggatgacgaccgtagtgatgaatctctcctggcgggaacagcaaaatatcacccggtcggcaaacaaattctcgtccctgatttttcaccaccccctgaccgcgaatggtgagattgagaatataacctttcattcccagcggtcggtcgataaaaaaatcgagataaccgttggcctcaatcggcgttaaacccgccaccagatgggcattaaacgagtatcccggcagcaggggatcattttgcgcttcagccatacttttcatactcccgccattcagagaagaaaccaattgtccatattgcatcagacattgccgtcactgcgtcttttactggctcttctcgctaaccaaaccggtaaccccgcttattaaaagcattctgtaacaaagcgggaccaaagccatgacaaaaacgcgtaacaaaagtgtctataatcacggcagaaaagtccacattgattatttgcacggcgtcacactttgctatgccatagcatttttatccataagattagcggatcctacctgacgctttttatcgcaactctctactgtttctccatacccgttttttgggctaacaggaggaattaacgatatcggtgataccagcatcgtcttgatgcccttggcagcaccctgctaaggaggtaacaacaagatgacagaagttttattttatgtactatcagcgctgcgcttaagctcctggtctggtttcgcttggctggacaacctgttggagatgcagtaccacggcagcattatcgtggaagttcgtatgactgaagtactgttttatgtacttagtgcattacgtttgtcgtcatggtcagggttcgcttggcttgataacttgttggaaatgcagtatcatggatccatcattgtcgaagttcgttaactaggtataatactagctgagaccagtgactactggtctcagttttagagctagaaatagcaagttaaaataaggctagtccgttatcaacttgaaaaagtggcaccgagtcggtgctttttttataaaacgaaaggctcagtcgaaagactgggcctttcgttttatccgaatacgggttcttgcatgttacattgtcgatctgttcatggtgaacagctttaaatgcaccaaaaactcgtaaaagctctgatgtatctatcttttttacaccgttttcatctgtgcatatggacagttttccctttgatatctaacggtgaacagttgttctacttttgtttgttagtcttgatgcttcactgatagatacaagagccataagaacctcagatccttccgtatttagccagtatgttctctagtgtggttcgttgtttttgcgtgagccatgagaacgaaccattgagatcatgcttactttgcatgtcactcaaaaattttgcctcaaaactggtgagctgaatttttgcagttaaagcatcgtgtagtgtttttcttagtccgttacgtaggtaggaatctgatgtaatggttgttggtattttgtcaccattcatttttatctggttgttctcaagttcggttacgagatccatttgtctatctagttcaacttggaaaatcaacgtatcagtcgggcggcctcgcttatcaaccaccaatttcatattgctgtaagtgtttaaatctttacttattggtttcaaaacccattggttaagccttttaaactcatggtagttattttcaagcattaacatgaacttaaattcatcaaggctaatctctatatttgccttgtgagttttcttttgtgttagttcttttaataaccactcataaatcctcatagagtatttgttttcaaaagacttaacatgttccagattatattttatgaatttttttaactggaaaagataaggcaatatctcttcactaaaaactaattctaatttttcgcttgagaacttggcatagtttgtccactggaaaatctcaaagcctttaaccaaaggattcctgatttccacagttctcgtcatcagctctctggttgctttagctaatacaccataagcattttccctactgatgttcatcatctgagcgtattggttataagtgaacgataccgtccgttctttccttgtagggttttcaatcgtggggttgagtagtgccacacagcataaaattagcttggtttcatgctccgttaagtcatagcgactaatcgctagttcatttgctttgaaaacaactaattcagacatacatctcaattggtctaggtgattttaatcactataccaattgagatgggctagtcaatgataattactagtccttttcccgggagatctgggtatctgtaaattctgctagacctttgctggaaaacttgtaaattctgctagaccctctgtaaattccgctagacctttgtgtgtttttttt

SEQ ID NO: 939 - DNA, 4842 bp, Synthetic construct
  source 1..4842: mol_type = other DNA
gtttatattcaagtggttataatttatagaataaagaaagaataaaaaaagataaaaagaatagatcccagccctgtgtataactcactactttagtcagttccgcagtattacaaaaggatgtcgcaaacgctgtttgctcctctacaaaacagaccttaaaaccctaaaggcttaagtagcaccctcgcaagctcgggcaaatcgctgaatattccttttgtctccgaccatcaggcacctgagtcgctgtctttttcgtgacattcagttcgctgcgctcacggctctggcagtgaatgggggtaaatggcactacaggcgccttttatggattcatgcaaggaaactacccataatacaagaaaagcccgtcacgggcttctcagggcgttttatggcgggtctgctatgtggtgctatctgactttttgctgttcagcagttcctgccctctgattttccagtctgaccacttcggattatcccgtgacaggtcattcagactggctaatgcacccagtaaggcagcggtatcatcaacaggcttacccgtcttactgtccctagtgcttggattctcaccaataaaaaacgcccggcggcaaccgagcgttctgaacaaatccagatggagttctgaggtcattactggatctatcaacaggagtccaagcgagctctcgaaccccagagtcccgctcagaagaactcgtcaagaaggcgatagaaggcgatgcgctgcgaatcgggagcggcgataccgtaaagcacgaggaagcggtcagcccattcgccgccaagctcttcagcaatatcacgggtagccaacgctatgtcctgatagcggtccgccacacccagccggccacagtcgatgaatccagaaaagcggccattttccaccatgatattcggcaagcaggcatcgccatgggtcacgacgagatcctcgccgtcgggcatgcgcgccttgagcctggcgaacagttcggctggcgcgagcccctgatgctcttcgtccagatcatcctgatcgacaagaccggcttccatccgagtacgtgctcgctcgatgcgatgtttcgcttggtggtcgaatgggcaggtagccggatcaagcgtatgcagccgccgcattgcatcagccatgatggatactttctcggcaggagcaaggtgagatgacaggagatcctgccccggcacttcgcccaatagcagccagtcccttcccgcttcagtgacaacgtcgagcacagctgcgcaaggaacgcccgtcgtggccagccacgatagccgcgctgcctcgtcctgcagttcattcagggcaccggacaggtcggtcttgacaaaaagaaccgggcgcccctgcgctgacagccggaacacggcggcatcagagcagccgattgtctgttgtgcccagtcatagccgaatagcctctccacccaagcggccggagaacctgcgtgcaatccatcttgttcaatcatactcttcctttttcaatattattgaagcatttatcagggttattgtctcatgagcggatacatatttgaatgtatttagaaaaataaacaaataggggttccgcgcacatttccccgaaaagtgccacctgacgtctaagaaaccattattatcatgacattaacctataaaaataggcgtatcacgaggcagaatttcagataaaaaaaatccttagctttcgctaaggatgatttctggaattctaaagatctttgacagctagttatgacaacttgacggctacatcattcactttttcttcacaaccggcacggaactcgctcgggctggccccggtgcattttttaaatacccgcgagaagtagagttgatcgtcaaaaccaacattgcgaccgacggtggcgataggcatccgggtggtgctcaaaagcagcttcgcctggctgatacgttggtcctcgcgccagcttaagacgctaatccctaactgctggcggaaaagatgtgacagacgcgacggcgacaagcaaacatgctgtgcgacgctggcgatatcaaaattgctgtctgccaggtgatcgctgatgtactgacaagcctcgcgtacccgattatccatcggtggatggagcgactcgttaatcgcttccatgcgccgcagtaacaattgctcaagcagatttatcgccagcagctccgaatagcgcccttccccttgcccggcgttaatgatttgcccaaacaggtcgctgaaatgcggctggtgcgcttcatccgggcgaaagaaccccgtattggcaaatattgacggccagttaagccattcatgccagtaggcgcgcggacgaaagtaaacccactggtgataccattcgcgagcctccggatgacgaccgtagtgatgaatctctcctggcgggaacagcaaaatatcacccggtcggcaaacaaattctcgtccctgatttttcaccaccccctgaccgcgaatggtgagattgagaatataacctttcattcccagcggtcggtcgataaaaaaatcgagataaccgttggcctcaatcggcgttaaacccgccaccagatgggcattaaacgagtatcccggcagcaggggatcattttgcgcttcagccatacttttcatactcccgccattcagagaagaaaccaattgtccatattgcatcagacattgccgtcactgcgtcttttactggctcttctcgctaaccaaaccggtaaccccgcttattaaaagcattctgtaacaaagcgggaccaaagccatgacaaaaacgcgtaacaaaagtgtctataatcacggcagaaaagtccacattgattatttgcacggcgtcacactttgctatgccatagcatttttatccataagattagcggatcctacctgacgctttttatcgcaactctctactgtttctccatacccgttttttgggctaacaggaggaattaacgatatcggtgataccagcatcgtcttgatgcccttggcagcaccctgctaaggaggtaacaacaagatgagaatatcaattagggctctattagcagcgctgttggttaccttgggctacttcacgtgcggtgctgcaatgggtctggacagcctgttaggcagcacctataacgtgtccgtgaccctgggtgttccgatgcgtatctcgattcgtgcgttgctggcagctttactggtaacattaggttactttacatgcggtgcagcgatgggcctggattcgttactgggctccacgtataatgtaagcgtgactcttggtgtcccgtaactaggtataatactagctgagaccagtgactactggtctcagttttagagctagaaatagcaagttaaaataaggctagtccgttatcaacttgaaaaagtggcaccgagtcggtgctttttttataaaacgaaaggctcagtcgaaagactgggcctttcgttttatccgaatacgggttcttgcatgttacattgtcgatctgttcatggtgaacagctttaaatgcaccaaaaactcgtaaaagctctgatgtatctatcttttttacaccgttttcatctgtgcatatggacagttttccctttgatatctaacggtgaacagttgttctacttttgtttgttagtcttgatgcttcactgatagatacaagagccataagaacctcagatccttccgtatttagccagtatgttctctagtgtggttcgttgtttttgcgtgagccatgagaacgaaccattgagatcatgcttactttgcatgtcactcaaaaattttgcctcaaaactggtgagctgaatttttgcagttaaagcatcgtgtagtgtttttcttagtccgttacgtaggtaggaatctgatgtaatggttgttggtattttgtcaccattcatttttatctggttgttctcaagttcggttacgagatccatttgtctatctagttcaacttggaaaatcaacgtatcagtcgggcggcctcgcttatcaaccaccaatttcatattgctgtaagtgtttaaatctttacttattggtttcaaaacccattggttaagccttttaaactcatggtagttattttcaagcattaacatgaacttaaattcatcaaggctaatctctatatttgccttgtgagttttcttttgtgttagttcttttaataaccactcataaatcctcatagagtatttgttttcaaaagacttaacatgttccagattatattttatgaatttttttaactggaaaagataaggcaatatctcttcactaaaaactaattctaatttttcgcttgagaacttggcatagtttgtccactggaaaatctcaaagcctttaaccaaaggattcctgatttccacagttctcgtcatcagctctctggttgctttagctaatacaccataagcattttccctactgatgttcatcatctgagcgtattggttataagtgaacgataccgtccgttctttccttgtagggttttcaatcgtggggttgagtagtgccacacagcataaaattagcttggtttcatgctccgttaagtcatagcgactaatcgctagttcatttgctttgaaaacaactaattcagacatacatctcaattggtctaggtgattttaatcactataccaattgagatgggctagtcaatgataattactagtccttttcccgggagatctgggtatctgtaaattctgctagacctttgctggaaaacttgtaaattctgctagaccctctgtaaattccgctagacctttgtgtgtttttttt

SEQ ID NO: 940 - DNA, 4800 bp, Synthetic construct
  source 1..4800: mol_type = other DNA
gtttatattcaagtggttataatttatagaataaagaaagaataaaaaaagataaaaagaatagatcccagccctgtgtataactcactactttagtcagttccgcagtattacaaaaggatgtcgcaaacgctgtttgctcctctacaaaacagaccttaaaaccctaaaggcttaagtagcaccctcgcaagctcgggcaaatcgctgaatattccttttgtctccgaccatcaggcacctgagtcgctgtctttttcgtgacattcagttcgctgcgctcacggctctggcagtgaatgggggtaaatggcactacaggcgccttttatggattcatgcaaggaaactacccataatacaagaaaagcccgtcacgggcttctcagggcgttttatggcgggtctgctatgtggtgctatctgactttttgctgttcagcagttcctgccctctgattttccagtctgaccacttcggattatcccgtgacaggtcattcagactggctaatgcacccagtaaggcagcggtatcatcaacaggcttacccgtcttactgtccctagtgcttggattctcaccaataaaaaacgcccggcggcaaccgagcgttctgaacaaatccagatggagttctgaggtcattactggatctatcaacaggagtccaagcgagctctcgaaccccagagtcccgctcagaagaactcgtcaagaaggcgatagaaggcgatgcgctgcgaatcgggagcggcgataccgtaaagcacgaggaagcggtcagcccattcgccgccaagctcttcagcaatatcacgggtagccaacgctatgtcctgatagcggtccgccacacccagccggccacagtcgatgaatccagaaaagcggccattttccaccatgatattcggcaagcaggcatcgccatgggtcacgacgagatcctcgccgtcgggcatgcgcgccttgagcctggcgaacagttcggctggcgcgagcccctgatgctcttcgtccagatcatcctgatcgacaagaccggcttccatccgagtacgtgctcgctcgatgcgatgtttcgcttggtggtcgaatgggcaggtagccggatcaagcgtatgcagccgccgcattgcatcagccatgatggatactttctcggcaggagcaaggtgagatgacaggagatcctgccccggcacttcgcccaatagcagccagtcccttcccgcttcagtgacaacgtcgagcacagctgcgcaaggaacgcccgtcgtggccagccacgatagccgcgctgcctcgtcctgcagttcattcagggcaccggacaggtcggtcttgacaaaaagaaccgggcgcccctgcgctgacagccggaacacggcggcatcagagcagccgattgtctgttgtgcccagtcatagccgaatagcctctccacccaagcggccggagaacctgcgtgcaatccatcttgttcaatcatactcttcctttttcaatattattgaagcatttatcagggttattgtctcatgagcggatacatatttgaatgtatttagaaaaataaacaaataggggttccgcgcacatttccccgaaaagtgccacctgacgtctaagaaaccattattatcatgacattaacctataaaaataggcgtatcacgaggcagaatttcagataaaaaaaatccttagctttcgctaaggatgatttctggaattctaaagatctttgacagctagttatgacaacttgacggctacatcattcactttttcttcacaaccggcacggaactcgctcgggctggccccggtgcattttttaaatacccgcgagaagtagagttgatcgtcaaaaccaacattgcgaccgacggtggcgataggcatccgggtggtgctcaaaagcagcttcgcctggctgatacgttggtcctcgcgccagcttaagacgctaatccctaactgctggcggaaaagatgtgacagacgcgacggcgacaagcaaacatgctgtgcgacgctggcgatatcaaaattgctgtctgccaggtgatcgctgatgtactgacaagcctcgcgtacccgattatccatcggtggatggagcgactcgttaatcgcttccatgcgccgcagtaacaattgctcaagcagatttatcgccagcagctccgaatagcgcccttccccttgcccggcgttaatgatttgcccaaacaggtcgctgaaatgcggctggtgcgcttcatccgggcgaaagaaccccgtattggcaaatattgacggccagttaagccattcatgccagtaggcgcgcggacgaaagtaaacccactggtgataccattcgcgagcctccggatgacgaccgtagtgatgaatctctcctggcgggaacagcaaaatatcacccggtcggcaaacaaattctcgtccctgatttttcaccaccccctgaccgcgaatggtgagattgagaatataacctttcattcccagcggtcggtcgataaaaaaatcgagataaccgttggcctcaatcggcgttaaacccgccaccagatgggcattaaacgagtatcccggcagcaggggatcattttgcgcttcagccatacttttcatactcccgccattcagagaagaaaccaattgtccatattgcatcagacattgccgtcactgcgtcttttactggctcttctcgctaaccaaaccggtaaccccgcttattaaaagcattctgtaacaaagcgggaccaaagccatgacaaaaacgcgtaacaaaagtgtctataatcacggcagaaaagtccacattgattatttgcacggcgtcacactttgctatgccatagcatttttatccataagattagcggatcctacctgacgctttttatcgcaactctctactgtttctccatacccgttttttgggctaacaggaggaattaacgatatcggtgataccagcatcgtcttgatgcccttggcagcaccctgctaaggaggtaacaacaagatggtaatactaaggtttatgacaatgtgtttgagctggctgtgtaaggacaaaggtattgataatctgctggagatgatctataacgtgatctgcgacggcgattacaccatggtcattcttcgcttcatgacaatgtgcctttcgtggctgtgcaaagataaaggcattgacaaccttttggagatgatctacaatgtcatctgtgatggtgattatacgtaactaggtataatactagctgagaccagtgactactggtctcagttttagagctagaaatagcaagttaaaataaggctagtccgttatcaacttgaaaaagtggcaccgagtcggtgctttttttataaaacgaaaggctcagtcgaaagactgggcctttcgttttatccgaatacgggttcttgcatgttacattgtcgatctgttcatggtgaacagctttaaatgcaccaaaaactcgtaaaagctctgatgtatctatcttttttacaccgttttcatctgtgcatatggacagttttccctttgatatctaacggtgaacagttgttctacttttgtttgttagtcttgatgcttcactgatagatacaagagccataagaacctcagatccttccgtatttagccagtatgttctctagtgtggttcgttgtttttgcgtgagccatgagaacgaaccattgagatcatgcttactttgcatgtcactcaaaaattttgcctcaaaactggtgagctgaatttttgcagttaaagcatcgtgtagtgtttttcttagtccgttacgtaggtaggaatctgatgtaatggttgttggtattttgtcaccattcatttttatctggttgttctcaagttcggttacgagatccatttgtctatctagttcaacttggaaaatcaacgtatcagtcgggcggcctcgcttatcaaccaccaatttcatattgctgtaagtgtttaaatctttacttattggtttcaaaacccattggttaagccttttaaactcatggtagttattttcaagcattaacatgaacttaaattcatcaaggctaatctctatatttgccttgtgagttttcttttgtgttagttcttttaataaccactcataaatcctcatagagtatttgttttcaaaagacttaacatgttccagattatattttatgaatttttttaactggaaaagataaggcaatatctcttcactaaaaactaattctaatttttcgcttgagaacttggcatagtttgtccactggaaaatctcaaagcctttaaccaaaggattcctgatttccacagttctcgtcatcagctctctggttgctttagctaatacaccataagcattttccctactgatgttcatcatctgagcgtattggttataagtgaacgataccgtccgttctttccttgtagggttttcaatcgtggggttgagtagtgccacacagcataaaattagcttggtttcatgctccgttaagtcatagcgactaatcgctagttcatttgctttgaaaacaactaattcagacatacatctcaattggtctaggtgattttaatcactataccaattgagatgggctagtcaatgataattactagtccttttcccgggagatctgggtatctgtaaattctgctagacctttgctggaaaacttgtaaattctgctagaccctctgtaaattccgctagacctttgtgtgtttttttt

SEQ ID NO: 941 - DNA, 4818 bp, Synthetic construct
  source 1..4818: mol_type = other DNA
gtttatattcaagtggttataatttatagaataaagaaagaataaaaaaagataaaaagaatagatcccagccctgtgtataactcactactttagtcagttccgcagtattacaaaaggatgtcgcaaacgctgtttgctcctctacaaaacagaccttaaaaccctaaaggcttaagtagcaccctcgcaagctcgggcaaatcgctgaatattccttttgtctccgaccatcaggcacctgagtcgctgtctttttcgtgacattcagttcgctgcgctcacggctctggcagtgaatgggggtaaatggcactacaggcgccttttatggattcatgcaaggaaactacccataatacaagaaaagcccgtcacgggcttctcagggcgttttatggcgggtctgctatgtggtgctatctgactttttgctgttcagcagttcctgccctctgattttccagtctgaccacttcggattatcccgtgacaggtcattcagactggctaatgcacccagtaaggcagcggtatcatcaacaggcttacccgtcttactgtccctagtgcttggattctcaccaataaaaaacgcccggcggcaaccgagcgttctgaacaaatccagatggagttctgaggtcattactggatctatcaacaggagtccaagcgagctctcgaaccccagagtcccgctcagaagaactcgtcaagaaggcgatagaaggcgatgcgctgcgaatcgggagcggcgataccgtaaagcacgaggaagcggtcagcccattcgccgccaagctcttcagcaatatcacgggtagccaacgctatgtcctgatagcggtccgccacacccagccggccacagtcgatgaatccagaaaagcggccattttccaccatgatattcggcaagcaggcatcgccatgggtcacgacgagatcctcgccgtcgggcatgcgcgccttgagcctggcgaacagttcggctggcgcgagcccctgatgctcttcgtccagatcatcctgatcgacaagaccggcttccatccgagtacgtgctcgctcgatgcgatgtttcgcttggtggtcgaatgggcaggtagccggatcaagcgtatgcagccgccgcattgcatcagccatgatggatactttctcggcaggagcaaggtgagatgacaggagatcctgccccggcacttcgcccaatagcagccagtcccttcccgcttcagtgacaacgtcgagcacagctgcgcaaggaacgcccgtcgtggccagccacgatagccgcgctgcctcgtcctgcagttcattcagggcaccggacaggtcggtcttgacaaaaagaaccgggcgcccctgcgctgacagccggaacacggcggcatcagagcagccgattgtctgttgtgcccagtcatagccgaatagcctctccacccaagcggccggagaacctgcgtgcaatccatcttgttcaatcatactcttcctttttcaatattattgaagcatttatcagggttattgtctcatgagcggatacatatttgaatgtatttagaaaaataaacaaataggggttccgcgcacatttccccgaaaagtgccacctgacgtctaagaaaccattattatcatgacattaacctataaaaataggcgtatcacgaggcagaatttcagataaaaaaaatccttagctttcgctaaggatgatttctggaattctaaagatctttgacagctagttatgacaacttgacggctacatcattcactttttcttcacaaccggcacggaactcgctcgggctggccccggtgcattttttaaatacccgcgagaagtagagttgatcgtcaaaaccaacattgcgaccgacggtggcgataggcatccgggtggtgctcaaaagcagcttcgcctggctgatacgttggtcctcgcgccagcttaagacgctaatccctaactgctggcggaaaagatgtgacagacgcgacggcgacaagcaaacatgctgtgcgacgctggcgatatcaaaattgctgtctgccaggtgatcgctgatgtactgacaagcctcgcgtacccgattatccatcggtggatggagcgactcgttaatcgcttccatgcgccgcagtaacaattgctcaagcagatttatcgccagcagctccgaatagcgcccttccccttgcccggcgttaatgatttgcccaaacaggtcgctgaaatgcggctggtgcgcttcatccgggcgaaagaaccccgtattggcaaatattgacggccagttaagccattcatgccagtaggcgcgcggacgaaagtaaacccactggtgataccattcgcgagcctccggatgacgaccgtagtgatgaatctctcctggcgggaacagcaaaatatcacccggtcggcaaacaaattctcgtccctgatttttcaccaccccctgaccgcgaatggtgagattgagaatataacctttcattcccagcggtcggtcgataaaaaaatcgagataaccgttggcctcaatcggcgttaaacccgccaccagatgggcattaaacgagtatcccggcagcaggggatcattttgcgcttcagccatacttttcatactcccgccattcagagaagaaaccaattgtccatattgcatcagacattgccgtcactgcgtcttttactggctcttctcgctaaccaaaccggtaaccccgcttattaaaagcattctgtaacaaagcgggaccaaagccatgacaaaaacgcgtaacaaaagtgtctataatcacggcagaaaagtccacattgattatttgcacggcgtcacactttgctatgccatagcatttttatccataagattagcggatcctacctgacgctttttatcgcaactctctactgtttctccatacccgttttttgggctaacaggaggaattaacgatatcggtgataccagcatcgtcttgatgcccttggcagcaccctgctaaggaggtaacaacaagatgaaaacactattccaatttatgttatcaatctgcagcgcttgtctgggtggtgttccgattggcctggacaacttgctggaaatggattacgcgattacgatcaccgtcgaggtgtccatgaagacactgtttcagtttatgttgagcatctgcagcgcttgtctggggggggtgccaatcggacttgataatctgttggagatggattacgcaatcaccattaccgttgaagtctcttaactaggtataatactagctgagaccagtgactactggtctcagttttagagctagaaatagcaagttaaaataaggctagtccgttatcaacttgaaaaagtggcaccgagtcggtgctttttttataaaacgaaaggctcagtcgaaagactgggcctttcgttttatccgaatacgggttcttgcatgttacattgtcgatctgttcatggtgaacagctttaaatgcaccaaaaactcgtaaaagctctgatgtatctatcttttttacaccgttttcatctgtgcatatggacagttttccctttgatatctaacggtgaacagttgttctacttttgtttgttagtcttgatgcttcactgatagatacaagagccataagaacctcagatccttccgtatttagccagtatgttctctagtgtggttcgttgtttttgcgtgagccatgagaacgaaccattgagatcatgcttactttgcatgtcactcaaaaattttgcctcaaaactggtgagctgaatttttgcagttaaagcatcgtgtagtgtttttcttagtccgttacgtaggtaggaatctgatgtaatggttgttggtattttgtcaccattcatttttatctggttgttctcaagttcggttacgagatccatttgtctatctagttcaacttggaaaatcaacgtatcagtcgggcggcctcgcttatcaaccaccaatttcatattgctgtaagtgtttaaatctttacttattggtttcaaaacccattggttaagccttttaaactcatggtagttattttcaagcattaacatgaacttaaattcatcaaggctaatctctatatttgccttgtgagttttcttttgtgttagttcttttaataaccactcataaatcctcatagagtatttgttttcaaaagacttaacatgttccagattatattttatgaatttttttaactggaaaagataaggcaatatctcttcactaaaaactaattctaatttttcgcttgagaacttggcatagtttgtccactggaaaatctcaaagcctttaaccaaaggattcctgatttccacagttctcgtcatcagctctctggttgctttagctaatacaccataagcattttccctactgatgttcatcatctgagcgtattggttataagtgaacgataccgtccgttctttccttgtagggttttcaatcgtggggttgagtagtgccacacagcataaaattagcttggtttcatgctccgttaagtcatagcgactaatcgctagttcatttgctttgaaaacaactaattcagacatacatctcaattggtctaggtgattttaatcactataccaattgagatgggctagtcaatgataattactagtccttttcccgggagatctgggtatctgtaaattctgctagacctttgctggaaaacttgtaaattctgctagaccctctgtaaattccgctagacctttgtgtgtttttttt

SEQ ID NO: 942 - DNA, 4812 bp, Synthetic construct
  source 1..4812: mol_type = other DNA
gtttatattcaagtggttataatttatagaataaagaaagaataaaaaaagataaaaagaatagatcccagccctgtgtataactcactactttagtcagttccgcagtattacaaaaggatgtcgcaaacgctgtttgctcctctacaaaacagaccttaaaaccctaaaggcttaagtagcaccctcgcaagctcgggcaaatcgctgaatattccttttgtctccgaccatcaggcacctgagtcgctgtctttttcgtgacattcagttcgctgcgctcacggctctggcagtgaatgggggtaaatggcactacaggcgccttttatggattcatgcaaggaaactacccataatacaagaaaagcccgtcacgggcttctcagggcgttttatggcgggtctgctatgtggtgctatctgactttttgctgttcagcagttcctgccctctgattttccagtctgaccacttcggattatcccgtgacaggtcattcagactggctaatgcacccagtaaggcagcggtatcatcaacaggcttacccgtcttactgtccctagtgcttggattctcaccaataaaaaacgcccggcggcaaccgagcgttctgaacaaatccagatggagttctgaggtcattactggatctatcaacaggagtccaagcgagctctcgaaccccagagtcccgctcagaagaactcgtcaagaaggcgatagaaggcgatgcgctgcgaatcgggagcggcgataccgtaaagcacgaggaagcggtcagcccattcgccgccaagctcttcagcaatatcacgggtagccaacgctatgtcctgatagcggtccgccacacccagccggccacagtcgatgaatccagaaaagcggccattttccaccatgatattcggcaagcaggcatcgccatgggtcacgacgagatcctcgccgtcgggcatgcgcgccttgagcctggcgaacagttcggctggcgcgagcccctgatgctcttcgtccagatcatcctgatcgacaagaccggcttccatccgagtacgtgctcgctcgatgcgatgtttcgcttggtggtcgaatgggcaggtagccggatcaagcgtatgcagccgccgcattgcatcagccatgatggatactttctcggcaggagcaaggtgagatgacaggagatcctgccccggcacttcgcccaatagcagccagtcccttcccgcttcagtgacaacgtcgagcacagctgcgcaaggaacgcccgtcgtggccagccacgatagccgcgctgcctcgtcctgcagttcattcagggcaccggacaggtcggtcttgacaaaaagaaccgggcgcccctgcgctgacagccggaacacggcggcatcagagcagccgattgtctgttgtgcccagtcatagccgaatagcctctccacccaagcggccggagaacctgcgtgcaatccatcttgttcaatcatactcttcctttttcaatattattgaagcatttatcagggttattgtctcatgagcggatacatatttgaatgtatttagaaaaataaacaaataggggttccgcgcacatttccccgaaaagtgccacctgacgtctaagaaaccattattatcatgacattaacctataaaaataggcgtatcacgaggcagaatttcagataaaaaaaatccttagctttcgctaaggatgatttctggaattctaaagatctttgacagctagttatgacaacttgacggctacatcattcactttttcttcacaaccggcacggaactcgctcgggctggccccggtgcattttttaaatacccgcgagaagtagagttgatcgtcaaaaccaacattgcgaccgacggtggcgataggcatccgggtggtgctcaaaagcagcttcgcctggctgatacgttggtcctcgcgccagcttaagacgctaatccctaactgctggcggaaaagatgtgacagacgcgacggcgacaagcaaacatgctgtgcgacgctggcgatatcaaaattgctgtctgccaggtgatcgctgatgtactgacaagcctcgcgtacccgattatccatcggtggatggagcgactcgttaatcgcttccatgcgccgcagtaacaattgctcaagcagatttatcgccagcagctccgaatagcgcccttccccttgcccggcgttaatgatttgcccaaacaggtcgctgaaatgcggctggtgcgcttcatccgggcgaaagaaccccgtattggcaaatattgacggccagttaagccattcatgccagtaggcgcgcggacgaaagtaaacccactggtgataccattcgcgagcctccggatgacgaccgtagtgatgaatctctcctggcgggaacagcaaaatatcacccggtcggcaaacaaattctcgtccctgatttttcaccaccccctgaccgcgaatggtgagattgagaatataacctttcattcccagcggtcggtcgataaaaaaatcgagataaccgttggcctcaatcggcgttaaacccgccaccagatgggcattaaacgagtatcccggcagcaggggatcattttgcgcttcagccatacttttcatactcccgccattcagagaagaaaccaattgtccatattgcatcagacattgccgtcactgcgtcttttactggctcttctcgctaaccaaaccggtaaccccgcttattaaaagcattctgtaacaaagcgggaccaaagccatgacaaaaacgcgtaacaaaagtgtctataatcacggcagaaaagtccacattgattatttgcacggcgtcacactttgctatgccatagcatttttatccataagattagcggatcctacctgacgctttttatcgcaactctctactgtttctccatacccgttttttgggctaacaggaggaattaacgatatcggtgataccagcatcgtcttgatgcccttggcagcaccctgctaaggaggtaacaacaagatgaatattatacacttattggtatcactatggtccgtgttcagcgagggccgttggccgggtgttgacaagttgctggaaaccctgtacaacgtcatcagcattatggagacgatcatgaatatcatccatttacttgtgagcctttggtccgtattctcggaagggcgctggcctggtgtggacaaactgttggaaactctgtacaatgtgatctcaattatggagaccatctaactaggtataatactagctgagaccagtgactactggtctcagttttagagctagaaatagcaagttaaaataaggctagtccgttatcaacttgaaaaagtggcaccgagtcggtgctttttttataaaacgaaaggctcagtcgaaagactgggcctttcgttttatccgaatacgggttcttgcatgttacattgtcgatctgttcatggtgaacagctttaaatgcaccaaaaactcgtaaaagctctgatgtatctatcttttttacaccgttttcatctgtgcatatggacagttttccctttgatatctaacggtgaacagttgttctacttttgtttgttagtcttgatgcttcactgatagatacaagagccataagaacctcagatccttccgtatttagccagtatgttctctagtgtggttcgttgtttttgcgtgagccatgagaacgaaccattgagatcatgcttactttgcatgtcactcaaaaattttgcctcaaaactggtgagctgaatttttgcagttaaagcatcgtgtagtgtttttcttagtccgttacgtaggtaggaatctgatgtaatggttgttggtattttgtcaccattcatttttatctggttgttctcaagttcggttacgagatccatttgtctatctagttcaacttggaaaatcaacgtatcagtcgggcggcctcgcttatcaaccaccaatttcatattgctgtaagtgtttaaatctttacttattggtttcaaaacccattggttaagccttttaaactcatggtagttattttcaagcattaacatgaacttaaattcatcaaggctaatctctatatttgccttgtgagttttcttttgtgttagttcttttaataaccactcataaatcctcatagagtatttgttttcaaaagacttaacatgttccagattatattttatgaatttttttaactggaaaagataaggcaatatctcttcactaaaaactaattctaatttttcgcttgagaacttggcatagtttgtccactggaaaatctcaaagcctttaaccaaaggattcctgatttccacagttctcgtcatcagctctctggttgctttagctaatacaccataagcattttccctactgatgttcatcatctgagcgtattggttataagtgaacgataccgtccgttctttccttgtagggttttcaatcgtggggttgagtagtgccacacagcataaaattagcttggtttcatgctccgttaagtcatagcgactaatcgctagttcatttgctttgaaaacaactaattcagacatacatctcaattggtctaggtgattttaatcactataccaattgagatgggctagtcaatgataattactagtccttttcccgggagatctgggtatctgtaaattctgctagacctttgctggaaaacttgtaaattctgctagaccctctgtaaattccgctagacctttgtgtgtttttttt

SEQ ID NO: 943 - DNA, 4938 bp, Synthetic construct
  source 1..4938: mol_type = other DNA
gtttatattcaagtggttataatttatagaataaagaaagaataaaaaaagataaaaagaatagatcccagccctgtgtataactcactactttagtcagttccgcagtattacaaaaggatgtcgcaaacgctgtttgctcctctacaaaacagaccttaaaaccctaaaggcttaagtagcaccctcgcaagctcgggcaaatcgctgaatattccttttgtctccgaccatcaggcacctgagtcgctgtctttttcgtgacattcagttcgctgcgctcacggctctggcagtgaatgggggtaaatggcactacaggcgccttttatggattcatgcaaggaaactacccataatacaagaaaagcccgtcacgggcttctcagggcgttttatggcgggtctgctatgtggtgctatctgactttttgctgttcagcagttcctgccctctgattttccagtctgaccacttcggattatcccgtgacaggtcattcagactggctaatgcacccagtaaggcagcggtatcatcaacaggcttacccgtcttactgtccctagtgcttggattctcaccaataaaaaacgcccggcggcaaccgagcgttctgaacaaatccagatggagttctgaggtcattactggatctatcaacaggagtccaagcgagctctcgaaccccagagtcccgctcagaagaactcgtcaagaaggcgatagaaggcgatgcgctgcgaatcgggagcggcgataccgtaaagcacgaggaagcggtcagcccattcgccgccaagctcttcagcaatatcacgggtagccaacgctatgtcctgatagcggtccgccacacccagccggccacagtcgatgaatccagaaaagcggccattttccaccatgatattcggcaagcaggcatcgccatgggtcacgacgagatcctcgccgtcgggcatgcgcgccttgagcctggcgaacagttcggctggcgcgagcccctgatgctcttcgtccagatcatcctgatcgacaagaccggcttccatccgagtacgtgctcgctcgatgcgatgtttcgcttggtggtcgaatgggcaggtagccggatcaagcgtatgcagccgccgcattgcatcagccatgatggatactttctcggcaggagcaaggtgagatgacaggagatcctgccccggcacttcgcccaatagcagccagtcccttcccgcttcagtgacaacgtcgagcacagctgcgcaaggaacgcccgtcgtggccagccacgatagccgcgctgcctcgtcctgcagttcattcagggcaccggacaggtcggtcttgacaaaaagaaccgggcgcccctgcgctgacagccggaacacggcggcatcagagcagccgattgtctgttgtgcccagtcatagccgaatagcctctccacccaagcggccggagaacctgcgtgcaatccatcttgttcaatcatactcttcctttttcaatattattgaagcatttatcagggttattgtctcatgagcggatacatatttgaatgtatttagaaaaataaacaaataggggttccgcgcacatttccccgaaaagtgccacctgacgtctaagaaaccattattatcatgacattaacctataaaaataggcgtatcacgaggcagaatttcagataaaaaaaatccttagctttcgctaaggatgatttctggaattctaaagatctttgacagctagttatgacaacttgacggctacatcattcactttttcttcacaaccggcacggaactcgctcgggctggccccggtgcattttttaaatacccgcgagaagtagagttgatcgtcaaaaccaacattgcgaccgacggtggcgataggcatccgggtggtgctcaaaagcagcttcgcctggctgatacgttggtcctcgcgccagcttaagacgctaatccctaactgctggcggaaaagatgtgacagacgcgacggcgacaagcaaacatgctgtgcgacgctggcgatatcaaaattgctgtctgccaggtgatcgctgatgtactgacaagcctcgcgtacccgattatccatcggtggatggagcgactcgttaatcgcttccatgcgccgcagtaacaattgctcaagcagatttatcgccagcagctccgaatagcgcccttccccttgcccggcgttaatgatttgcccaaacaggtcgctgaaatgcggctggtgcgcttcatccgggcgaaagaaccccgtattggcaaatattgacggccagttaagccattcatgccagtaggcgcgcggacgaaagtaaacccactggtgataccattcgcgagcctccggatgacgaccgtagtgatgaatctctcctggcgggaacagcaaaatatcacccggtcggcaaacaaattctcgtccctgatttttcaccaccccctgaccgcgaatggtgagattgagaatataacctttcattcccagcggtcggtcgataaaaaaatcgagataaccgttggcctcaatcggcgttaaacccgccaccagatgggcattaaacgagtatcccggcagcaggggatcattttgcgcttcagccatacttttcatactcccgccattcagagaagaaaccaattgtccatattgcatcagacattgccgtcactgcgtcttttactggctcttctcgctaaccaaaccggtaaccccgcttattaaaagcattctgtaacaaagcgggaccaaagccatgacaaaaacgcgtaacaaaagtgtctataatcacggcagaaaagtccacattgattatttgcacggcgtcacactttgctatgccatagcatttttatccataagattagcggatcctacctgacgctttttatcgcaactctctactgtttctccatacccgttttttgggctaacaggaggaattaacgatatcggtgataccagcatcgtcttgatgcccttggcagcaccctgctaaggaggtaacaacaagatgacagaagttttattttatgtactatcagcgctgcgcttaagctcctggtctggtttcgcttggctggacaacctgttggagatgcagtaccacggcagcattatcgtggaagttcgtatgactgaagtactgttttatgtacttagtgcattacgtttgtcgtcatggtcagggttcgcttggcttgataacttgttggaaatgcagtatcatggatccatcattgtcgaagttcgtatgacagaagtgcttttttacgtgttgtccgcgcttcgtctttcatcctggagcggatttgcttggctggacaaccttcttgaaatgcagtatcacggaagcatcattgtggaggtacgctaactaggtataatactagctgagaccagtgactactggtctcagttttagagctagaaatagcaagttaaaataaggctagtccgttatcaacttgaaaaagtggcaccgagtcggtgctttttttataaaacgaaaggctcagtcgaaagactgggcctttcgttttatccgaatacgggttcttgcatgttacattgtcgatctgttcatggtgaacagctttaaatgcaccaaaaactcgtaaaagctctgatgtatctatcttttttacaccgttttcatctgtgcatatggacagttttccctttgatatctaacggtgaacagttgttctacttttgtttgttagtcttgatgcttcactgatagatacaagagccataagaacctcagatccttccgtatttagccagtatgttctctagtgtggttcgttgtttttgcgtgagccatgagaacgaaccattgagatcatgcttactttgcatgtcactcaaaaattttgcctcaaaactggtgagctgaatttttgcagttaaagcatcgtgtagtgtttttcttagtccgttacgtaggtaggaatctgatgtaatggttgttggtattttgtcaccattcatttttatctggttgttctcaagttcggttacgagatccatttgtctatctagttcaacttggaaaatcaacgtatcagtcgggcggcctcgcttatcaaccaccaatttcatattgctgtaagtgtttaaatctttacttattggtttcaaaacccattggttaagccttttaaactcatggtagttattttcaagcattaacatgaacttaaattcatcaaggctaatctctatatttgccttgtgagttttcttttgtgttagttcttttaataaccactcataaatcctcatagagtatttgttttcaaaagacttaacatgttccagattatattttatgaatttttttaactggaaaagataaggcaatatctcttcactaaaaactaattctaatttttcgcttgagaacttggcatagtttgtccactggaaaatctcaaagcctttaaccaaaggattcctgatttccacagttctcgtcatcagctctctggttgctttagctaatacaccataagcattttccctactgatgttcatcatctgagcgtattggttataagtgaacgataccgtccgttctttccttgtagggttttcaatcgtggggttgagtagtgccacacagcataaaattagcttggtttcatgctccgttaagtcatagcgactaatcgctagttcatttgctttgaaaacaactaattcagacatacatctcaattggtctaggtgattttaatcactataccaattgagatgggctagtcaatgataattactagtccttttcccgggagatctgggtatctgtaaattctgctagacctttgctggaaaacttgtaaattctgctagaccctctgtaaattccgctagacctttgtgtgtttttttt

SEQ ID NO: 944 - DNA, 4974 bp, Synthetic construct
  source 1..4974: mol_type = other DNA
gtttatattcaagtggttataatttatagaataaagaaagaataaaaaaagataaaaagaatagatcccagccctgtgtataactcactactttagtcagttccgcagtattacaaaaggatgtcgcaaacgctgtttgctcctctacaaaacagaccttaaaaccctaaaggcttaagtagcaccctcgcaagctcgggcaaatcgctgaatattccttttgtctccgaccatcaggcacctgagtcgctgtctttttcgtgacattcagttcgctgcgctcacggctctggcagtgaatgggggtaaatggcactacaggcgccttttatggattcatgcaaggaaactacccataatacaagaaaagcccgtcacgggcttctcagggcgttttatggcgggtctgctatgtggtgctatctgactttttgctgttcagcagttcctgccctctgattttccagtctgaccacttcggattatcccgtgacaggtcattcagactggctaatgcacccagtaaggcagcggtatcatcaacaggcttacccgtcttactgtccctagtgcttggattctcaccaataaaaaacgcccggcggcaaccgagcgttctgaacaaatccagatggagttctgaggtcattactggatctatcaacaggagtccaagcgagctctcgaaccccagagtcccgctcagaagaactcgtcaagaaggcgatagaaggcgatgcgctgcgaatcgggagcggcgataccgtaaagcacgaggaagcggtcagcccattcgccgccaagctcttcagcaatatcacgggtagccaacgctatgtcctgatagcggtccgccacacccagccggccacagtcgatgaatccagaaaagcggccattttccaccatgatattcggcaagcaggcatcgccatgggtcacgacgagatcctcgccgtcgggcatgcgcgccttgagcctggcgaacagttcggctggcgcgagcccctgatgctcttcgtccagatcatcctgatcgacaagaccggcttccatccgagtacgtgctcgctcgatgcgatgtttcgcttggtggtcgaatgggcaggtagccggatcaagcgtatgcagccgccgcattgcatcagccatgatggatactttctcggcaggagcaaggtgagatgacaggagatcctgccccggcacttcgcccaatagcagccagtcccttcccgcttcagtgacaacgtcgagcacagctgcgcaaggaacgcccgtcgtggccagccacgatagccgcgctgcctcgtcctgcagttcattcagggcaccggacaggtcggtcttgacaaaaagaaccgggcgcccctgcgctgacagccggaacacggcggcatcagagcagccgattgtctgttgtgcccagtcatagccgaatagcctctccacccaagcggccggagaacctgcgtgcaatccatcttgttcaatcatactcttcctttttcaatattattgaagcatttatcagggttattgtctcatgagcggatacatatttgaatgtatttagaaaaataaacaaataggggttccgcgcacatttccccgaaaagtgccacctgacgtctaagaaaccattattatcatgacattaacctataaaaataggcgtatcacgaggcagaatttcagataaaaaaaatccttagctttcgctaaggatgatttctggaattctaaagatctttgacagctagttatgacaacttgacggctacatcattcactttttcttcacaaccggcacggaactcgctcgggctggccccggtgcattttttaaatacccgcgagaagtagagttgatcgtcaaaaccaacattgcgaccgacggtggcgataggcatccgggtggtgctcaaaagcagcttcgcctggctgatacgttggtcctcgcgccagcttaagacgctaatccctaactgctggcggaaaagatgtgacagacgcgacggcgacaagcaaacatgctgtgcgacgctggcgatatcaaaattgctgtctgccaggtgatcgctgatgtactgacaagcctcgcgtacccgattatccatcggtggatggagcgactcgttaatcgcttccatgcgccgcagtaacaattgctcaagcagatttatcgccagcagctccgaatagcgcccttccccttgcccggcgttaatgatttgcccaaacaggtcgctgaaatgcggctggtgcgcttcatccgggcgaaagaaccccgtattggcaaatattgacggccagttaagccattcatgccagtaggcgcgcggacgaaagtaaacccactggtgataccattcgcgagcctccggatgacgaccgtagtgatgaatctctcctggcgggaacagcaaaatatcacccggtcggcaaacaaattctcgtccctgatttttcaccaccccctgaccgcgaatggtgagattgagaatataacctttcattcccagcggtcggtcgataaaaaaatcgagataaccgttggcctcaatcggcgttaaacccgccaccagatgggcattaaacgagtatcccggcagcaggggatcattttgcgcttcagccatacttttcatactcccgccattcagagaagaaaccaattgtccatattgcatcagacattgccgtcactgcgtcttttactggctcttctcgctaaccaaaccggtaaccccgcttattaaaagcattctgtaacaaagcgggaccaaagccatgacaaaaacgcgtaacaaaagtgtctataatcacggcagaaaagtccacattgattatttgcacggcgtcacactttgctatgccatagcatttttatccataagattagcggatcctacctgacgctttttatcgcaactctctactgtttctccatacccgttttttgggctaacaggaggaattaacgatatcggtgataccagcatcgtcttgatgcccttggcagcaccctgctaaggaggtaacaacaagatgagaatatcaattagggctctattagcagcgctgttggttaccttgggctacttcacgtgcggtgctgcaatgggtctggacagcctgttaggcagcacctataacgtgtccgtgaccctgggtgttccgatgcgtatctcgattcgtgcgttgctggcagctttactggtaacattaggttactttacatgcggtgcagcgatgggcctggattcgttactgggctccacgtataatgtaagcgtgactcttggtgtcccgatgcgcatttccatccgtgctctgctggccgcattattagtaacattaggttattttacctgcggggccgcgatgggcctggactcactgctgggatcaacgtataacgtgtcagtaaccttgggtgtcccgtaactaggtataatactagctgagaccagtgactactggtctcagttttagagctagaaatagcaagttaaaataaggctagtccgttatcaacttgaaaaagtggcaccgagtcggtgctttttttataaaacgaaaggctcagtcgaaagactgggcctttcgttttatccgaatacgggttcttgcatgttacattgtcgatctgttcatggtgaacagctttaaatgcaccaaaaactcgtaaaagctctgatgtatctatcttttttacaccgttttcatctgtgcatatggacagttttccctttgatatctaacggtgaacagttgttctacttttgtttgttagtcttgatgcttcactgatagatacaagagccataagaacctcagatccttccgtatttagccagtatgttctctagtgtggttcgttgtttttgcgtgagccatgagaacgaaccattgagatcatgcttactttgcatgtcactcaaaaattttgcctcaaaactggtgagctgaatttttgcagttaaagcatcgtgtagtgtttttcttagtccgttacgtaggtaggaatctgatgtaatggttgttggtattttgtcaccattcatttttatctggttgttctcaagttcggttacgagatccatttgtctatctagttcaacttggaaaatcaacgtatcagtcgggcggcctcgcttatcaaccaccaatttcatattgctgtaagtgtttaaatctttacttattggtttcaaaacccattggttaagccttttaaactcatggtagttattttcaagcattaacatgaacttaaattcatcaaggctaatctctatatttgccttgtgagttttcttttgtgttagttcttttaataaccactcataaatcctcatagagtatttgttttcaaaagacttaacatgttccagattatattttatgaatttttttaactggaaaagataaggcaatatctcttcactaaaaactaattctaatttttcgcttgagaacttggcatagtttgtccactggaaaatctcaaagcctttaaccaaaggattcctgatttccacagttctcgtcatcagctctctggttgctttagctaatacaccataagcattttccctactgatgttcatcatctgagcgtattggttataagtgaacgataccgtccgttctttccttgtagggttttcaatcgtggggttgagtagtgccacacagcataaaattagcttggtttcatgctccgttaagtcatagcgactaatcgctagttcatttgctttgaaaacaactaattcagacatacatctcaattggtctaggtgattttaatcactataccaattgagatgggctagtcaatgataattactagtccttttcccgggagatctgggtatctgtaaattctgctagacctttgctggaaaacttgtaaattctgctagaccctctgtaaattccgctagacctttgtgtgtttttttt

SEQ ID NO: 945 - DNA, 4911 bp, Synthetic construct
  source 1..4911: mol_type = other DNA
gtttatattcaagtggttataatttatagaataaagaaagaataaaaaaagataaaaagaatagatcccagccctgtgtataactcactactttagtcagttccgcagtattacaaaaggatgtcgcaaacgctgtttgctcctctacaaaacagaccttaaaaccctaaaggcttaagtagcaccctcgcaagctcgggcaaatcgctgaatattccttttgtctccgaccatcaggcacctgagtcgctgtctttttcgtgacattcagttcgctgcgctcacggctctggcagtgaatgggggtaaatggcactacaggcgccttttatggattcatgcaaggaaactacccataatacaagaaaagcccgtcacgggcttctcagggcgttttatggcgggtctgctatgtggtgctatctgactttttgctgttcagcagttcctgccctctgattttccagtctgaccacttcggattatcccgtgacaggtcattcagactggctaatgcacccagtaaggcagcggtatcatcaacaggcttacccgtcttactgtccctagtgcttggattctcaccaataaaaaacgcccggcggcaaccgagcgttctgaacaaatccagatggagttctgaggtcattactggatctatcaacaggagtccaagcgagctctcgaaccccagagtcccgctcagaagaactcgtcaagaaggcgatagaaggcgatgcgctgcgaatcgggagcggcgataccgtaaagcacgaggaagcggtcagcccattcgccgccaagctcttcagcaatatcacgggtagccaacgctatgtcctgatagcggtccgccacacccagccggccacagtcgatgaatccagaaaagcggccattttccaccatgatattcggcaagcaggcatcgccatgggtcacgacgagatcctcgccgtcgggcatgcgcgccttgagcctggcgaacagttcggctggcgcgagcccctgatgctcttcgtccagatcatcctgatcgacaagaccggcttccatccgagtacgtgctcgctcgatgcgatgtttcgcttggtggtcgaatgggcaggtagccggatcaagcgtatgcagccgccgcattgcatcagccatgatggatactttctcggcaggagcaaggtgagatgacaggagatcctgccccggcacttcgcccaatagcagccagtcccttcccgcttcagtgacaacgtcgagcacagctgcgcaaggaacgcccgtcgtggccagccacgatagccgcgctgcctcgtcctgcagttcattcagggcaccggacaggtcggtcttgacaaaaagaaccgggcgcccctgcgctgacagccggaacacggcggcatcagagcagccgattgtctgttgtgcccagtcatagccgaatagcctctccacccaagcggccggagaacctgcgtgcaatccatcttgttcaatcatactcttcctttttcaatattattgaagcatttatcagggttattgtctcatgagcggatacatatttgaatgtatttagaaaaataaacaaataggggttccgcgcacatttccccgaaaagtgccacctgacgtctaagaaaccattattatcatgacattaacctataaaaataggcgtatcacgaggcagaatttcagataaaaaaaatccttagctttcgctaaggatgatttctggaattctaaagatctttgacagctagttatgacaacttgacggctacatcattcactttttcttcacaaccggcacggaactcgctcgggctggccccggtgcattttttaaatacccgcgagaagtagagttgatcgtcaaaaccaacattgcgaccgacggtggcgataggcatccgggtggtgctcaaaagcagcttcgcctggctgatacgttggtcctcgcgccagcttaagacgctaatccctaactgctggcggaaaagatgtgacagacgcgacggcgacaagcaaacatgctgtgcgacgctggcgatatcaaaattgctgtctgccaggtgatcgctgatgtactgacaagcctcgcgtacccgattatccatcggtggatggagcgactcgttaatcgcttccatgcgccgcagtaacaattgctcaagcagatttatcgccagcagctccgaatagcgcccttccccttgcccggcgttaatgatttgcccaaacaggtcgctgaaatgcggctggtgcgcttcatccgggcgaaagaaccccgtattggcaaatattgacggccagttaagccattcatgccagtaggcgcgcggacgaaagtaaacccactggtgataccattcgcgagcctccggatgacgaccgtagtgatgaatctctcctggcgggaacagcaaaatatcacccggtcggcaaacaaattctcgtccctgatttttcaccaccccctgaccgcgaatggtgagattgagaatataacctttcattcccagcggtcggtcgataaaaaaatcgagataaccgttggcctcaatcggcgttaaacccgccaccagatgggcattaaacgagtatcccggcagcaggggatcattttgcgcttcagccatacttttcatactcccgccattcagagaagaaaccaattgtccatattgcatcagacattgccgtcactgcgtcttttactggctcttctcgctaaccaaaccggtaaccccgcttattaaaagcattctgtaacaaagcgggaccaaagccatgacaaaaacgcgtaacaaaagtgtctataatcacggcagaaaagtccacattgattatttgcacggcgtcacactttgctatgccatagcatttttatccataagattagcggatcctacctgacgctttttatcgcaactctctactgtttctccatacccgttttttgggctaacaggaggaattaacgatatcggtgataccagcatcgtcttgatgcccttggcagcaccctgctaaggaggtaacaacaagatggtaatactaaggtttatgacaatgtgtttgagctggctgtgtaaggacaaaggtattgataatctgctggagatgatctataacgtgatctgcgacggcgattacaccatggtcattcttcgcttcatgacaatgtgcctttcgtggctgtgcaaagataaaggcattgacaaccttttggagatgatctacaatgtcatctgtgatggtgattatacgatggtcatcttgcgctttatgactatgtgtttaagttggctttgtaaggataaaggtatcgacaaccttcttgaaatgatttacaatgttatttgcgacggtgattacacttaactaggtataatactagctgagaccagtgactactggtctcagttttagagctagaaatagcaagttaaaataaggctagtccgttatcaacttgaaaaagtggcaccgagtcggtgctttttttataaaacgaaaggctcagtcgaaagactgggcctttcgttttatccgaatacgggttcttgcatgttacattgtcgatctgttcatggtgaacagctttaaatgcaccaaaaactcgtaaaagctctgatgtatctatcttttttacaccgttttcatctgtgcatatggacagttttccctttgatatctaacggtgaacagttgttctacttttgtttgttagtcttgatgcttcactgatagatacaagagccataagaacctcagatccttccgtatttagccagtatgttctctagtgtggttcgttgtttttgcgtgagccatgagaacgaaccattgagatcatgcttactttgcatgtcactcaaaaattttgcctcaaaactggtgagctgaatttttgcagttaaagcatcgtgtagtgtttttcttagtccgttacgtaggtaggaatctgatgtaatggttgttggtattttgtcaccattcatttttatctggttgttctcaagttcggttacgagatccatttgtctatctagttcaacttggaaaatcaacgtatcagtcgggcggcctcgcttatcaaccaccaatttcatattgctgtaagtgtttaaatctttacttattggtttcaaaacccattggttaagccttttaaactcatggtagttattttcaagcattaacatgaacttaaattcatcaaggctaatctctatatttgccttgtgagttttcttttgtgttagttcttttaataaccactcataaatcctcatagagtatttgttttcaaaagacttaacatgttccagattatattttatgaatttttttaactggaaaagataaggcaatatctcttcactaaaaactaattctaatttttcgcttgagaacttggcatagtttgtccactggaaaatctcaaagcctttaaccaaaggattcctgatttccacagttctcgtcatcagctctctggttgctttagctaatacaccataagcattttccctactgatgttcatcatctgagcgtattggttataagtgaacgataccgtccgttctttccttgtagggttttcaatcgtggggttgagtagtgccacacagcataaaattagcttggtttcatgctccgttaagtcatagcgactaatcgctagttcatttgctttgaaaacaactaattcagacatacatctcaattggtctaggtgattttaatcactataccaattgagatgggctagtcaatgataattactagtccttttcccgggagatctgggtatctgtaaattctgctagacctttgctggaaaacttgtaaattctgctagaccctctgtaaattccgctagacctttgtgtgtttttttt

SEQ ID NO: 946 - DNA, 4938 bp, Synthetic construct
  source 1..4938: mol_type = other DNA
gtttatattcaagtggttataatttatagaataaagaaagaataaaaaaagataaaaagaatagatcccagccctgtgtataactcactactttagtcagttccgcagtattacaaaaggatgtcgcaaacgctgtttgctcctctacaaaacagaccttaaaaccctaaaggcttaagtagcaccctcgcaagctcgggcaaatcgctgaatattccttttgtctccgaccatcaggcacctgagtcgctgtctttttcgtgacattcagttcgctgcgctcacggctctggcagtgaatgggggtaaatggcactacaggcgccttttatggattcatgcaaggaaactacccataatacaagaaaagcccgtcacgggcttctcagggcgttttatggcgggtctgctatgtggtgctatctgactttttgctgttcagcagttcctgccctctgattttccagtctgaccacttcggattatcccgtgacaggtcattcagactggctaatgcacccagtaaggcagcggtatcatcaacaggcttacccgtcttactgtccctagtgcttggattctcaccaataaaaaacgcccggcggcaaccgagcgttctgaacaaatccagatggagttctgaggtcattactggatctatcaacaggagtccaagcgagctctcgaaccccagagtcccgctcagaagaactcgtcaagaaggcgatagaaggcgatgcgctgcgaatcgggagcggcgataccgtaaagcacgaggaagcggtcagcccattcgccgccaagctcttcagcaatatcacgggtagccaacgctatgtcctgatagcggtccgccacacccagccggccacagtcgatgaatccagaaaagcggccattttccaccatgatattcggcaagcaggcatcgccatgggtcacgacgagatcctcgccgtcgggcatgcgcgccttgagcctggcgaacagttcggctggcgcgagcccctgatgctcttcgtccagatcatcctgatcgacaagaccggcttccatccgagtacgtgctcgctcgatgcgatgtttcgcttggtggtcgaatgggcaggtagccggatcaagcgtatgcagccgccgcattgcatcagccatgatggatactttctcggcaggagcaaggtgagatgacaggagatcctgccccggcacttcgcccaatagcagccagtcccttcccgcttcagtgacaacgtcgagcacagctgcgcaaggaacgcccgtcgtggccagccacgatagccgcgctgcctcgtcctgcagttcattcagggcaccggacaggtcggtcttgacaaaaagaaccgggcgcccctgcgctgacagccggaacacggcggcatcagagcagccgattgtctgttgtgcccagtcatagccgaatagcctctccacccaagcggccggagaacctgcgtgcaatccatcttgttcaatcatactcttcctttttcaatattattgaagcatttatcagggttattgtctcatgagcggatacatatttgaatgtatttagaaaaataaacaaataggggttccgcgcacatttccccgaaaagtgccacctgacgtctaagaaaccattattatcatgacattaacctataaaaataggcgtatcacgaggcagaatttcagataaaaaaaatccttagctttcgctaaggatgatttctggaattctaaagatctttgacagctagttatgacaacttgacggctacatcattcactttttcttcacaaccggcacggaactcgctcgggctggccccggtgcattttttaaatacccgcgagaagtagagttgatcgtcaaaaccaacattgcgaccgacggtggcgataggcatccgggtggtgctcaaaagcagcttcgcctggctgatacgttggtcctcgcgccagcttaagacgctaatccctaactgctggcggaaaagatgtgacagacgcgacggcgacaagcaaacatgctgtgcgacgctggcgatatcaaaattgctgtctgccaggtgatcgctgatgtactgacaagcctcgcgtacccgattatccatcggtggatggagcgactcgttaatcgcttccatgcgccgcagtaacaattgctcaagcagatttatcgccagcagctccgaatagcgcccttccccttgcccggcgttaatgatttgcccaaacaggtcgctgaaatgcggctggtgcgcttcatccgggcgaaagaaccccgtattggcaaatattgacggccagttaagccattcatgccagtaggcgcgcggacgaaagtaaacccactggtgataccattcgcgagcctccggatgacgaccgtagtgatgaatctctcctggcgggaacagcaaaatatcacccggtcggcaaacaaattctcgtccctgatttttcaccaccccctgaccgcgaatggtgagattgagaatataacctttcattcccagcggtcggtcgataaaaaaatcgagataaccgttggcctcaatcggcgttaaacccgccaccagatgggcattaaacgagtatcccggcagcaggggatcattttgcgcttcagccatacttttcatactcccgccattcagagaagaaaccaattgtccatattgcatcagacattgccgtcactgcgtcttttactggctcttctcgctaaccaaaccggtaaccccgcttattaaaagcattctgtaacaaagcgggaccaaagccatgacaaaaacgcgtaacaaaagtgtctataatcacggcagaaaagtccacattgattatttgcacggcgtcacactttgctatgccatagcatttttatccataagattagcggatcctacctgacgctttttatcgcaactctctactgtttctccatacccgttttttgggctaacaggaggaattaacgatatcggtgataccagcatcgtcttgatgcccttggcagcaccctgctaaggaggtaacaacaagatgaaaacactattccaatttatgttatcaatctgcagcgcttgtctgggtggtgttccgattggcctggacaacttgctggaaatggattacgcgattacgatcaccgtcgaggtgtccatgaagacactgtttcagtttatgttgagcatctgcagcgcttgtctggggggggtgccaatcggacttgataatctgttggagatggattacgcaatcaccattaccgttgaagtctctatgaaaacacttttccagttcatgttatccatttgcagcgcctgcctgggtggagtacccatcggtctggataatcttctggaaatggactacgctatcacaatcactgtcgaggtgagttaactaggtataatactagctgagaccagtgactactggtctcagttttagagctagaaatagcaagttaaaataaggctagtccgttatcaacttgaaaaagtggcaccgagtcggtgctttttttataaaacgaaaggctcagtcgaaagactgggcctttcgttttatccgaatacgggttcttgcatgttacattgtcgatctgttcatggtgaacagctttaaatgcaccaaaaactcgtaaaagctctgatgtatctatcttttttacaccgttttcatctgtgcatatggacagttttccctttgatatctaacggtgaacagttgttctacttttgtttgttagtcttgatgcttcactgatagatacaagagccataagaacctcagatccttccgtatttagccagtatgttctctagtgtggttcgttgtttttgcgtgagccatgagaacgaaccattgagatcatgcttactttgcatgtcactcaaaaattttgcctcaaaactggtgagctgaatttttgcagttaaagcatcgtgtagtgtttttcttagtccgttacgtaggtaggaatctgatgtaatggttgttggtattttgtcaccattcatttttatctggttgttctcaagttcggttacgagatccatttgtctatctagttcaacttggaaaatcaacgtatcagtcgggcggcctcgcttatcaaccaccaatttcatattgctgtaagtgtttaaatctttacttattggtttcaaaacccattggttaagccttttaaactcatggtagttattttcaagcattaacatgaacttaaattcatcaaggctaatctctatatttgccttgtgagttttcttttgtgttagttcttttaataaccactcataaatcctcatagagtatttgttttcaaaagacttaacatgttccagattatattttatgaatttttttaactggaaaagataaggcaatatctcttcactaaaaactaattctaatttttcgcttgagaacttggcatagtttgtccactggaaaatctcaaagcctttaaccaaaggattcctgatttccacagttctcgtcatcagctctctggttgctttagctaatacaccataagcattttccctactgatgttcatcatctgagcgtattggttataagtgaacgataccgtccgttctttccttgtagggttttcaatcgtggggttgagtagtgccacacagcataaaattagcttggtttcatgctccgttaagtcatagcgactaatcgctagttcatttgctttgaaaacaactaattcagacatacatctcaattggtctaggtgattttaatcactataccaattgagatgggctagtcaatgataattactagtccttttcccgggagatctgggtatctgtaaattctgctagacctttgctggaaaacttgtaaattctgctagaccctctgtaaattccgctagacctttgtgtgtttttttt

SEQ ID NO: 947 - DNA, 5058 bp, Synthetic construct
  source 1..5058: mol_type = other DNA
gtttatattcaagtggttataatttatagaataaagaaagaataaaaaaagataaaaagaatagatcccagccctgtgtataactcactactttagtcagttccgcagtattacaaaaggatgtcgcaaacgctgtttgctcctctacaaaacagaccttaaaaccctaaaggcttaagtagcaccctcgcaagctcgggcaaatcgctgaatattccttttgtctccgaccatcaggcacctgagtcgctgtctttttcgtgacattcagttcgctgcgctcacggctctggcagtgaatgggggtaaatggcactacaggcgccttttatggattcatgcaaggaaactacccataatacaagaaaagcccgtcacgggcttctcagggcgttttatggcgggtctgctatgtggtgctatctgactttttgctgttcagcagttcctgccctctgattttccagtctgaccacttcggattatcccgtgacaggtcattcagactggctaatgcacccagtaaggcagcggtatcatcaacaggcttacccgtcttactgtccctagtgcttggattctcaccaataaaaaacgcccggcggcaaccgagcgttctgaacaaatccagatggagttctgaggtcattactggatctatcaacaggagtccaagcgagctctcgaaccccagagtcccgctcagaagaactcgtcaagaaggcgatagaaggcgatgcgctgcgaatcgggagcggcgataccgtaaagcacgaggaagcggtcagcccattcgccgccaagctcttcagcaatatcacgggtagccaacgctatgtcctgatagcggtccgccacacccagccggccacagtcgatgaatccagaaaagcggccattttccaccatgatattcggcaagcaggcatcgccatgggtcacgacgagatcctcgccgtcgggcatgcgcgccttgagcctggcgaacagttcggctggcgcgagcccctgatgctcttcgtccagatcatcctgatcgacaagaccggcttccatccgagtacgtgctcgctcgatgcgatgtttcgcttggtggtcgaatgggcaggtagccggatcaagcgtatgcagccgccgcattgcatcagccatgatggatactttctcggcaggagcaaggtgagatgacaggagatcctgccccggcacttcgcccaatagcagccagtcccttcccgcttcagtgacaacgtcgagcacagctgcgcaaggaacgcccgtcgtggccagccacgatagccgcgctgcctcgtcctgcagttcattcagggcaccggacaggtcggtcttgacaaaaagaaccgggcgcccctgcgctgacagccggaacacggcggcatcagagcagccgattgtctgttgtgcccagtcatagccgaatagcctctccacccaagcggccggagaacctgcgtgcaatccatcttgttcaatcatactcttcctttttcaatattattgaagcatttatcagggttattgtctcatgagcggatacatatttgaatgtatttagaaaaataaacaaataggggttccgcgcacatttccccgaaaagtgccacctgacgtctaagaaaccattattatcatgacattaacctataaaaataggcgtatcacgaggcagaatttcagataaaaaaaatccttagctttcgctaaggatgatttctggaattctaaagatctttgacagctagttatgacaacttgacggctacatcattcactttttcttcacaaccggcacggaactcgctcgggctggccccggtgcattttttaaatacccgcgagaagtagagttgatcgtcaaaaccaacattgcgaccgacggtggcgataggcatccgggtggtgctcaaaagcagcttcgcctggctgatacgttggtcctcgcgccagcttaagacgctaatccctaactgctggcggaaaagatgtgacagacgcgacggcgacaagcaaacatgctgtgcgacgctggcgatatcaaaattgctgtctgccaggtgatcgctgatgtactgacaagcctcgcgtacccgattatccatcggtggatggagcgactcgttaatcgcttccatgcgccgcagtaacaattgctcaagcagatttatcgccagcagctccgaatagcgcccttccccttgcccggcgttaatgatttgcccaaacaggtcgctgaaatgcggctggtgcgcttcatccgggcgaaagaaccccgtattggcaaatattgacggccagttaagccattcatgccagtaggcgcgcggacgaaagtaaacccactggtgataccattcgcgagcctccggatgacgaccgtagtgatgaatctctcctggcgggaacagcaaaatatcacccggtcggcaaacaaattctcgtccctgatttttcaccaccccctgaccgcgaatggtgagattgagaatataacctttcattcccagcggtcggtcgataaaaaaatcgagataaccgttggcctcaatcggcgttaaacccgccaccagatgggcattaaacgagtatcccggcagcaggggatcattttgcgcttcagccatacttttcatactcccgccattcagagaagaaaccaattgtccatattgcatcagacattgccgtcactgcgtcttttactggctcttctcgctaaccaaaccggtaaccccgcttattaaaagcattctgtaacaaagcgggaccaaagccatgacaaaaacgcgtaacaaaagtgtctataatcacggcagaaaagtccacattgattatttgcacggcgtcacactttgctatgccatagcatttttatccataagattagcggatcctacctgacgctttttatcgcaactctctactgtttctccatacccgttttttgggctaacaggaggaattaacgatatcggtgataccagcatcgtcttgatgcccttggcagcaccctgctaaggaggtaacaacaagatgacagaagttttattttatgtactatcagcgctgcgcttaagctcctggtctggtttcgcttggctggacaacctgttggagatgcagtaccacggcagcattattgtggaagttcgtatgactgaagtactgttttatgtacttagtgcattacgtttgtcgtcatggtcagggttcgcttggcttgataacttgttggaaatgcagtatcatggatccatcattgtcgaagttcgtatgacagaagtgcttttttacgtgttgtccgcgcttcgtctttcatcctggagcggatttgcttggctggacaaccttcttgaaatgcagtatcacggaagcatcattgtggaggtacgcatgacagaggtactgttctacgtgttgtcagctcttcgtctgtctagttggtcggggttcgcgtggttagacaacttgttggaaatgcaataccacggaagcatcattgtagaagtgcgttaactaggtataatactagctgagaccagtgactactggtctcagttttagagctagaaatagcaagttaaaataaggctagtccgttatcaacttgaaaaagtggcaccgagtcggtgctttttttataaaacgaaaggctcagtcgaaagactgggcctttcgttttatccgaatacgggttcttgcatgttacattgtcgatctgttcatggtgaacagctttaaatgcaccaaaaactcgtaaaagctctgatgtatctatcttttttacaccgttttcatctgtgcatatggacagttttccctttgatatctaacggtgaacagttgttctacttttgtttgttagtcttgatgcttcactgatagatacaagagccataagaacctcagatccttccgtatttagccagtatgttctctagtgtggttcgttgtttttgcgtgagccatgagaacgaaccattgagatcatgcttactttgcatgtcactcaaaaattttgcctcaaaactggtgagctgaatttttgcagttaaagcatcgtgtagtgtttttcttagtccgttacgtaggtaggaatctgatgtaatggttgttggtattttgtcaccattcatttttatctggttgttctcaagttcggttacgagatccatttgtctatctagttcaacttggaaaatcaacgtatcagtcgggcggcctcgcttatcaaccaccaatttcatattgctgtaagtgtttaaatctttacttattggtttcaaaacccattggttaagccttttaaactcatggtagttattttcaagcattaacatgaacttaaattcatcaaggctaatctctatatttgccttgtgagttttcttttgtgttagttcttttaataaccactcataaatcctcatagagtatttgttttcaaaagacttaacatgttccagattatattttatgaatttttttaactggaaaagataaggcaatatctcttcactaaaaactaattctaatttttcgcttgagaacttggcatagtttgtccactggaaaatctcaaagcctttaaccaaaggattcctgatttccacagttctcgtcatcagctctctggttgctttagctaatacaccataagcattttccctactgatgttcatcatctgagcgtattggttataagtgaacgataccgtccgttctttccttgtagggttttcaatcgtggggttgagtagtgccacacagcataaaattagcttggtttcatgctccgttaagtcatagcgactaatcgctagttcatttgctttgaaaacaactaattcagacatacatctcaattggtctaggtgattttaatcactataccaattgagatgggctagtcaatgataattactagtccttttcccgggagatctgggtatctgtaaattctgctagacctttgctggaaaacttgtaaattctgctagaccctctgtaaattccgctagacctttgtgtgtttttttt

SEQ ID NO: 948 - DNA, 5106 bp, Synthetic construct
  source 1..5106: mol_type = other DNA
gtttatattcaagtggttataatttatagaataaagaaagaataaaaaaagataaaaagaatagatcccagccctgtgtataactcactactttagtcagttccgcagtattacaaaaggatgtcgcaaacgctgtttgctcctctacaaaacagaccttaaaaccctaaaggcttaagtagcaccctcgcaagctcgggcaaatcgctgaatattccttttgtctccgaccatcaggcacctgagtcgctgtctttttcgtgacattcagttcgctgcgctcacggctctggcagtgaatgggggtaaatggcactacaggcgccttttatggattcatgcaaggaaactacccataatacaagaaaagcccgtcacgggcttctcagggcgttttatggcgggtctgctatgtggtgctatctgactttttgctgttcagcagttcctgccctctgattttccagtctgaccacttcggattatcccgtgacaggtcattcagactggctaatgcacccagtaaggcagcggtatcatcaacaggcttacccgtcttactgtccctagtgcttggattctcaccaataaaaaacgcccggcggcaaccgagcgttctgaacaaatccagatggagttctgaggtcattactggatctatcaacaggagtccaagcgagctctcgaaccccagagtcccgctcagaagaactcgtcaagaaggcgatagaaggcgatgcgctgcgaatcgggagcggcgataccgtaaagcacgaggaagcggtcagcccattcgccgccaagctcttcagcaatatcacgggtagccaacgctatgtcctgatagcggtccgccacacccagccggccacagtcgatgaatccagaaaagcggccattttccaccatgatattcggcaagcaggcatcgccatgggtcacgacgagatcctcgccgtcgggcatgcgcgccttgagcctggcgaacagttcggctggcgcgagcccctgatgctcttcgtccagatcatcctgatcgacaagaccggcttccatccgagtacgtgctcgctcgatgcgatgtttcgcttggtggtcgaatgggcaggtagccggatcaagcgtatgcagccgccgcattgcatcagccatgatggatactttctcggcaggagcaaggtgagatgacaggagatcctgccccggcacttcgcccaatagcagccagtcccttcccgcttcagtgacaacgtcgagcacagctgcgcaaggaacgcccgtcgtggccagccacgatagccgcgctgcctcgtcctgcagttcattcagggcaccggacaggtcggtcttgacaaaaagaaccgggcgcccctgcgctgacagccggaacacggcggcatcagagcagccgattgtctgttgtgcccagtcatagccgaatagcctctccacccaagcggccggagaacctgcgtgcaatccatcttgttcaatcatactcttcctttttcaatattattgaagcatttatcagggttattgtctcatgagcggatacatatttgaatgtatttagaaaaataaacaaataggggttccgcgcacatttccccgaaaagtgccacctgacgtctaagaaaccattattatcatgacattaacctataaaaataggcgtatcacgaggcagaatttcagataaaaaaaatccttagctttcgctaaggatgatttctggaattctaaagatctttgacagctagttatgacaacttgacggctacatcattcactttttcttcacaaccggcacggaactcgctcgggctggccccggtgcattttttaaatacccgcgagaagtagagttgatcgtcaaaaccaacattgcgaccgacggtggcgataggcatccgggtggtgctcaaaagcagcttcgcctggctgatacgttggtcctcgcgccagcttaagacgctaatccctaactgctggcggaaaagatgtgacagacgcgacggcgacaagcaaacatgctgtgcgacgctggcgatatcaaaattgctgtctgccaggtgatcgctgatgtactgacaagcctcgcgtacccgattatccatcggtggatggagcgactcgttaatcgcttccatgcgccgcagtaacaattgctcaagcagatttatcgccagcagctccgaatagcgcccttccccttgcccggcgttaatgatttgcccaaacaggtcgctgaaatgcggctggtgcgcttcatccgggcgaaagaaccccgtattggcaaatattgacggccagttaagccattcatgccagtaggcgcgcggacgaaagtaaacccactggtgataccattcgcgagcctccggatgacgaccgtagtgatgaatctctcctggcgggaacagcaaaatatcacccggtcggcaaacaaattctcgtccctgatttttcaccaccccctgaccgcgaatggtgagattgagaatataacctttcattcccagcggtcggtcgataaaaaaatcgagataaccgttggcctcaatcggcgttaaacccgccaccagatgggcattaaacgagtatcccggcagcaggggatcattttgcgcttcagccatacttttcatactcccgccattcagagaagaaaccaattgtccatattgcatcagacattgccgtcactgcgtcttttactggctcttctcgctaaccaaaccggtaaccccgcttattaaaagcattctgtaacaaagcgggaccaaagccatgacaaaaacgcgtaacaaaagtgtctataatcacggcagaaaagtccacattgattatttgcacggcgtcacactttgctatgccatagcatttttatccataagattagcggatcctacctgacgctttttatcgcaactctctactgtttctccatacccgttttttgggctaacaggaggaattaacgatatcggtgataccagcatcgtcttgatgcccttggcagcaccctgctaaggaggtaacaacaagatgagaatatcaattagggctctattagcagcgctgttggttaccttgggctacttcacgtgcggtgctgcaatgggtctggacagcctgttaggcagcacctataacgtgtccgtgaccctgggtgttccgatgcgtatctcgattcgtgcgttgctggcagctttactggtaacattaggttactttacatgcggtgcagcgatgggcctggattcgttactgggctccacgtataatgtaagcgtgactcttggtgtcccgatgcgcatttccatccgtgctctgctggccgcattattagtaacattaggttattttacctgcggggccgcgatgggcctggactcactgctgggatcaacgtataacgtgtcagtaaccttgggtgtcccgatgcgtatcagtatccgtgcactgttagcggccttgcttgtaacattaggatattttacttgcggagcggctatggggctggatagcttattgggttctacttacaatgtaagcgtcactcttggagtaccataactaggtataatactagctgagaccagtgactactggtctcagttttagagctagaaatagcaagttaaaataaggctagtccgttatcaacttgaaaaagtggcaccgagtcggtgctttttttataaaacgaaaggctcagtcgaaagactgggcctttcgttttatccgaatacgggttcttgcatgttacattgtcgatctgttcatggtgaacagctttaaatgcaccaaaaactcgtaaaagctctgatgtatctatcttttttacaccgttttcatctgtgcatatggacagttttccctttgatatctaacggtgaacagttgttctacttttgtttgttagtcttgatgcttcactgatagatacaagagccataagaacctcagatccttccgtatttagccagtatgttctctagtgtggttcgttgtttttgcgtgagccatgagaacgaaccattgagatcatgcttactttgcatgtcactcaaaaattttgcctcaaaactggtgagctgaatttttgcagttaaagcatcgtgtagtgtttttcttagtccgttacgtaggtaggaatctgatgtaatggttgttggtattttgtcaccattcatttttatctggttgttctcaagttcggttacgagatccatttgtctatctagttcaacttggaaaatcaacgtatcagtcgggcggcctcgcttatcaaccaccaatttcatattgctgtaagtgtttaaatctttacttattggtttcaaaacccattggttaagccttttaaactcatggtagttattttcaagcattaacatgaacttaaattcatcaaggctaatctctatatttgccttgtgagttttcttttgtgttagttcttttaataaccactcataaatcctcatagagtatttgttttcaaaagacttaacatgttccagattatattttatgaatttttttaactggaaaagataaggcaatatctcttcactaaaaactaattctaatttttcgcttgagaacttggcatagtttgtccactggaaaatctcaaagcctttaaccaaaggattcctgatttccacagttctcgtcatcagctctctggttgctttagctaatacaccataagcattttccctactgatgttcatcatctgagcgtattggttataagtgaacgataccgtccgttctttccttgtagggttttcaatcgtggggttgagtagtgccacacagcataaaattagcttggtttcatgctccgttaagtcatagcgactaatcgctagttcatttgctttgaaaacaactaattcagacatacatctcaattggtctaggtgattttaatcactataccaattgagatgggctagtcaatgataattactagtccttttcccgggagatctgggtatctgtaaattctgctagacctttgctggaaaacttgtaaattctgctagaccctctgtaaattccgctagacctttgtgtgtttttttt

SEQ ID NO: 949 - DNA, 5022 bp, Synthetic construct
  source 1..5022: mol_type = other DNA
gtttatattcaagtggttataatttatagaataaagaaagaataaaaaaagataaaaagaatagatcccagccctgtgtataactcactactttagtcagttccgcagtattacaaaaggatgtcgcaaacgctgtttgctcctctacaaaacagaccttaaaaccctaaaggcttaagtagcaccctcgcaagctcgggcaaatcgctgaatattccttttgtctccgaccatcaggcacctgagtcgctgtctttttcgtgacattcagttcgctgcgctcacggctctggcagtgaatgggggtaaatggcactacaggcgccttttatggattcatgcaaggaaactacccataatacaagaaaagcccgtcacgggcttctcagggcgttttatggcgggtctgctatgtggtgctatctgactttttgctgttcagcagttcctgccctctgattttccagtctgaccacttcggattatcccgtgacaggtcattcagactggctaatgcacccagtaaggcagcggtatcatcaacaggcttacccgtcttactgtccctagtgcttggattctcaccaataaaaaacgcccggcggcaaccgagcgttctgaacaaatccagatggagttctgaggtcattactggatctatcaacaggagtccaagcgagctctcgaaccccagagtcccgctcagaagaactcgtcaagaaggcgatagaaggcgatgcgctgcgaatcgggagcggcgataccgtaaagcacgaggaagcggtcagcccattcgccgccaagctcttcagcaatatcacgggtagccaacgctatgtcctgatagcggtccgccacacccagccggccacagtcgatgaatccagaaaagcggccattttccaccatgatattcggcaagcaggcatcgccatgggtcacgacgagatcctcgccgtcgggcatgcgcgccttgagcctggcgaacagttcggctggcgcgagcccctgatgctcttcgtccagatcatcctgatcgacaagaccggcttccatccgagtacgtgctcgctcgatgcgatgtttcgcttggtggtcgaatgggcaggtagccggatcaagcgtatgcagccgccgcattgcatcagccatgatggatactttctcggcaggagcaaggtgagatgacaggagatcctgccccggcacttcgcccaatagcagccagtcccttcccgcttcagtgacaacgtcgagcacagctgcgcaaggaacgcccgtcgtggccagccacgatagccgcgctgcctcgtcctgcagttcattcagggcaccggacaggtcggtcttgacaaaaagaaccgggcgcccctgcgctgacagccggaacacggcggcatcagagcagccgattgtctgttgtgcccagtcatagccgaatagcctctccacccaagcggccggagaacctgcgtgcaatccatcttgttcaatcatactcttcctttttcaatattattgaagcatttatcagggttattgtctcatgagcggatacatatttgaatgtatttagaaaaataaacaaataggggttccgcgcacatttccccgaaaagtgccacctgacgtctaagaaaccattattatcatgacattaacctataaaaataggcgtatcacgaggcagaatttcagataaaaaaaatccttagctttcgctaaggatgatttctggaattctaaagatctttgacagctagttatgacaacttgacggctacatcattcactttttcttcacaaccggcacggaactcgctcgggctggccccggtgcattttttaaatacccgcgagaagtagagttgatcgtcaaaaccaacattgcgaccgacggtggcgataggcatccgggtggtgctcaaaagcagcttcgcctggctgatacgttggtcctcgcgccagcttaagacgctaatccctaactgctggcggaaaagatgtgacagacgcgacggcgacaagcaaacatgctgtgcgacgctggcgatatcaaaattgctgtctgccaggtgatcgctgatgtactgacaagcctcgcgtacccgattatccatcggtggatggagcgactcgttaatcgcttccatgcgccgcagtaacaattgctcaagcagatttatcgccagcagctccgaatagcgcccttccccttgcccggcgttaatgatttgcccaaacaggtcgctgaaatgcggctggtgcgcttcatccgggcgaaagaaccccgtattggcaaatattgacggccagttaagccattcatgccagtaggcgcgcggacgaaagtaaacccactggtgataccattcgcgagcctccggatgacgaccgtagtgatgaatctctcctggcgggaacagcaaaatatcacccggtcggcaaacaaattctcgtccctgatttttcaccaccccctgaccgcgaatggtgagattgagaatataacctttcattcccagcggtcggtcgataaaaaaatcgagataaccgttggcctcaatcggcgttaaacccgccaccagatgggcattaaacgagtatcccggcagcaggggatcattttgcgcttcagccatacttttcatactcccgccattcagagaagaaaccaattgtccatattgcatcagacattgccgtcactgcgtcttttactggctcttctcgctaaccaaaccggtaaccccgcttattaaaagcattctgtaacaaagcgggaccaaagccatgacaaaaacgcgtaacaaaagtgtctataatcacggcagaaaagtccacattgattatttgcacggcgtcacactttgctatgccatagcatttttatccataagattagcggatcctacctgacgctttttatcgcaactctctactgtttctccatacccgttttttgggctaacaggaggaattaacgatatcggtgataccagcatcgtcttgatgcccttggcagcaccctgctaaggaggtaacaacaagatggtaatactaaggtttatgacaatgtgtttgagctggctgtgtaaggacaaaggtattgataatctgctggagatgatctataacgtgatctgcgacggcgattacaccatggtcattcttcgcttcatgacaatgtgcctttcgtggctgtgcaaagataaaggcattgacaaccttttggagatgatctacaatgtcatctgtgatggtgattatacgatggtcatcttgcgctttatgactatgtgtttaagttggctttgtaaggataaaggtatcgacaaccttcttgaaatgatttacaatgttatttgcgacggtgattacactatggtcattcttcgttttatgacgatgtgcttatcttggttgtgtaaagacaagggcattgataacttgcttgagatgatttataacgtaatttgcgacggtgattatacttaactaggtataatactagctgagaccagtgactactggtctcagttttagagctagaaatagcaagttaaaataaggctagtccgttatcaacttgaaaaagtggcaccgagtcggtgctttttttataaaacgaaaggctcagtcgaaagactgggcctttcgttttatccgaatacgggttcttgcatgttacattgtcgatctgttcatggtgaacagctttaaatgcaccaaaaactcgtaaaagctctgatgtatctatcttttttacaccgttttcatctgtgcatatggacagttttccctttgatatctaacggtgaacagttgttctacttttgtttgttagtcttgatgcttcactgatagatacaagagccataagaacctcagatccttccgtatttagccagtatgttctctagtgtggttcgttgtttttgcgtgagccatgagaacgaaccattgagatcatgcttactttgcatgtcactcaaaaattttgcctcaaaactggtgagctgaatttttgcagttaaagcatcgtgtagtgtttttcttagtccgttacgtaggtaggaatctgatgtaatggttgttggtattttgtcaccattcatttttatctggttgttctcaagttcggttacgagatccatttgtctatctagttcaacttggaaaatcaacgtatcagtcgggcggcctcgcttatcaaccaccaatttcatattgctgtaagtgtttaaatctttacttattggtttcaaaacccattggttaagccttttaaactcatggtagttattttcaagcattaacatgaacttaaattcatcaaggctaatctctatatttgccttgtgagttttcttttgtgttagttcttttaataaccactcataaatcctcatagagtatttgttttcaaaagacttaacatgttccagattatattttatgaatttttttaactggaaaagataaggcaatatctcttcactaaaaactaattctaatttttcgcttgagaacttggcatagtttgtccactggaaaatctcaaagcctttaaccaaaggattcctgatttccacagttctcgtcatcagctctctggttgctttagctaatacaccataagcattttccctactgatgttcatcatctgagcgtattggttataagtgaacgataccgtccgttctttccttgtagggttttcaatcgtggggttgagtagtgccacacagcataaaattagcttggtttcatgctccgttaagtcatagcgactaatcgctagttcatttgctttgaaaacaactaattcagacatacatctcaattggtctaggtgattttaatcactataccaattgagatgggctagtcaatgataattactagtccttttcccgggagatctgggtatctgtaaattctgctagacctttgctggaaaacttgtaaattctgctagaccctctgtaaattccgctagacctttgtgtgtttttttt

SEQ ID NO: 950 - DNA, 5058 bp, Synthetic construct
  source 1..5058: mol_type = other DNA
gtttatattcaagtggttataatttatagaataaagaaagaataaaaaaagataaaaagaatagatcccagccctgtgtataactcactactttagtcagttccgcagtattacaaaaggatgtcgcaaacgctgtttgctcctctacaaaacagaccttaaaaccctaaaggcttaagtagcaccctcgcaagctcgggcaaatcgctgaatattccttttgtctccgaccatcaggcacctgagtcgctgtctttttcgtgacattcagttcgctgcgctcacggctctggcagtgaatgggggtaaatggcactacaggcgccttttatggattcatgcaaggaaactacccataatacaagaaaagcccgtcacgggcttctcagggcgttttatggcgggtctgctatgtggtgctatctgactttttgctgttcagcagttcctgccctctgattttccagtctgaccacttcggattatcccgtgacaggtcattcagactggctaatgcacccagtaaggcagcggtatcatcaacaggcttacccgtcttactgtccctagtgcttggattctcaccaataaaaaacgcccggcggcaaccgagcgttctgaacaaatccagatggagttctgaggtcattactggatctatcaacaggagtccaagcgagctctcgaaccccagagtcccgctcagaagaactcgtcaagaaggcgatagaaggcgatgcgctgcgaatcgggagcggcgataccgtaaagcacgaggaagcggtcagcccattcgccgccaagctcttcagcaatatcacgggtagccaacgctatgtcctgatagcggtccgccacacccagccggccacagtcgatgaatccagaaaagcggccattttccaccatgatattcggcaagcaggcatcgccatgggtcacgacgagatcctcgccgtcgggcatgcgcgccttgagcctggcgaacagttcggctggcgcgagcccctgatgctcttcgtccagatcatcctgatcgacaagaccggcttccatccgagtacgtgctcgctcgatgcgatgtttcgcttggtggtcgaatgggcaggtagccggatcaagcgtatgcagccgccgcattgcatcagccatgatggatactttctcggcaggagcaaggtgagatgacaggagatcctgccccggcacttcgcccaatagcagccagtcccttcccgcttcagtgacaacgtcgagcacagctgcgcaaggaacgcccgtcgtggccagccacgatagccgcgctgcctcgtcctgcagttcattcagggcaccggacaggtcggtcttgacaaaaagaaccgggcgcccctgcgctgacagccggaacacggcggcatcagagcagccgattgtctgttgtgcccagtcatagccgaatagcctctccacccaagcggccggagaacctgcgtgcaatccatcttgttcaatcatactcttcctttttcaatattattgaagcatttatcagggttattgtctcatgagcggatacatatttgaatgtatttagaaaaataaacaaataggggttccgcgcacatttccccgaaaagtgccacctgacgtctaagaaaccattattatcatgacattaacctataaaaataggcgtatcacgaggcagaatttcagataaaaaaaatccttagctttcgctaaggatgatttctggaattctaaagatctttgacagctagttatgacaacttgacggctacatcattcactttttcttcacaaccggcacggaactcgctcgggctggccccggtgcattttttaaatacccgcgagaagtagagttgatcgtcaaaaccaacattgcgaccgacggtggcgataggcatccgggtggtgctcaaaagcagcttcgcctggctgatacgttggtcctcgcgccagcttaagacgctaatccctaactgctggcggaaaagatgtgacagacgcgacggcgacaagcaaacatgctgtgcgacgctggcgatatcaaaattgctgtctgccaggtgatcgctgatgtactgacaagcctcgcgtacccgattatccatcggtggatggagcgactcgttaatcgcttccatgcgccgcagtaacaattgctcaagcagatttatcgccagcagctccgaatagcgcccttccccttgcccggcgttaatgatttgcccaaacaggtcgctgaaatgcggctggtgcgcttcatccgggcgaaagaaccccgtattggcaaatattgacggccagttaagccattcatgccagtaggcgcgcggacgaaagtaaacccactggtgataccattcgcgagcctccggatgacgaccgtagtgatgaatctctcctggcgggaacagcaaaatatcacccggtcggcaaacaaattctcgtccctgatttttcaccaccccctgaccgcgaatggtgagattgagaatataacctttcattcccagcggtcggtcgataaaaaaatcgagataaccgttggcctcaatcggcgttaaacccgccaccagatgggcattaaacgagtatcccggcagcaggggatcattttgcgcttcagccatacttttcatactcccgccattcagagaagaaaccaattgtccatattgcatcagacattgccgtcactgcgtcttttactggctcttctcgctaaccaaaccggtaaccccgcttattaaaagcattctgtaacaaagcgggaccaaagccatgacaaaaacgcgtaacaaaagtgtctataatcacggcagaaaagtccacattgattatttgcacggcgtcacactttgctatgccatagcatttttatccataagattagcggatcctacctgacgctttttatcgcaactctctactgtttctccatacccgttttttgggctaacaggaggaattaacgatatcggtgataccagcatcgtcttgatgcccttggcagcaccctgctaaggaggtaacaacaagatgaaaacactattccaatttatgttatcaatctgcagcgcttgtctgggtggtgttccgattggcctggacaacttgctggaaatggattacgcgattacgatcaccgtcgaggtgtccatgaagacactgtttcagtttatgttgagcatctgcagcgcttgtctggggggggtgccaatcggacttgataatctgttggagatggattacgcaatcaccattaccgttgaagtctctatgaaaacacttttccagttcatgttatccatttgcagcgcctgcctgggtggagtacccatcggtctggataatcttctggaaatggactacgctatcacaatcactgtcgaggtgagtatgaaaacgttgtttcaatttatgttgtccatttgttcagcctgtttaggaggggttcccattgggctggacaatctgcttgaaatggactatgccatcacaattactgtggaagtgagctaactaggtataatactagctgagaccagtgactactggtctcagttttagagctagaaatagcaagttaaaataaggctagtccgttatcaacttgaaaaagtggcaccgagtcggtgctttttttataaaacgaaaggctcagtcgaaagactgggcctttcgttttatccgaatacgggttcttgcatgttacattgtcgatctgttcatggtgaacagctttaaatgcaccaaaaactcgtaaaagctctgatgtatctatcttttttacaccgttttcatctgtgcatatggacagttttccctttgatatctaacggtgaacagttgttctacttttgtttgttagtcttgatgcttcactgatagatacaagagccataagaacctcagatccttccgtatttagccagtatgttctctagtgtggttcgttgtttttgcgtgagccatgagaacgaaccattgagatcatgcttactttgcatgtcactcaaaaattttgcctcaaaactggtgagctgaatttttgcagttaaagcatcgtgtagtgtttttcttagtccgttacgtaggtaggaatctgatgtaatggttgttggtattttgtcaccattcatttttatctggttgttctcaagttcggttacgagatccatttgtctatctagttcaacttggaaaatcaacgtatcagtcgggcggcctcgcttatcaaccaccaatttcatattgctgtaagtgtttaaatctttacttattggtttcaaaacccattggttaagccttttaaactcatggtagttattttcaagcattaacatgaacttaaattcatcaaggctaatctctatatttgccttgtgagttttcttttgtgttagttcttttaataaccactcataaatcctcatagagtatttgttttcaaaagacttaacatgttccagattatattttatgaatttttttaactggaaaagataaggcaatatctcttcactaaaaactaattctaatttttcgcttgagaacttggcatagtttgtccactggaaaatctcaaagcctttaaccaaaggattcctgatttccacagttctcgtcatcagctctctggttgctttagctaatacaccataagcattttccctactgatgttcatcatctgagcgtattggttataagtgaacgataccgtccgttctttccttgtagggttttcaatcgtggggttgagtagtgccacacagcataaaattagcttggtttcatgctccgttaagtcatagcgactaatcgctagttcatttgctttgaaaacaactaattcagacatacatctcaattggtctaggtgattttaatcactataccaattgagatgggctagtcaatgataattactagtccttttcccgggagatctgggtatctgtaaattctgctagacctttgctggaaaacttgtaaattctgctagaccctctgtaaattccgctagacctttgtgtgtttttttt

SEQ ID NO: 951 - DNA, 4198 bp, Synthetic construct
  source 1..4198: mol_type = other DNA
acacgatataaaaccatctcattgcttgctgggttaactgagttgctgaatttttttctagaatttcgcaaaatttaataggtaaaccttgtttttttaaatttacgatgatataaaaataatgccctaaacaaaggtttaggggtattgtacaggttgtcaagcctcccacaggtcttggtgaaaccaatcactgtgacgacggtaagcaacacttggatgatattcataattgactccacgctactgattacattatacagcatatctaacatttgcggcgaggttcacaatttgtatttaggtactgattgtggatgagaaagggaacgtagactgacttggttaagccggaggatgtgtcctagaattgtcgctattctgtcatcctccggttttgctaatttcattcagggaatataatggactacaaagaccatgacggtgattataaagatcatgacatcgattacaaggatgacgatgacaagggaggaagcggatcgatgaataatgatgattacccatggttcagaaaacgtggttatttgcatttcgatgaacctgtttcattaaaaaaagcggttaaatatgtttcctctccagaaaaaataataaaacattcttttctgccatttttaagctttgaagtaaaatcgtttaaaatcaaaaaagacaaatcaacaaaacaattaagtaaaactgaaaaattaagacctattgcctattcctcacatttggatagtcatatttatgcattttacgcagaatatcttactggacattatgaattattgatccaagaaaacaatttacacgagaacatccttgccttcagatctttaaataaaagcaatatagaatttgccaagagagcatttgatacaattactgaaatgggtgagtgtagcgctgttgcattagatctttctggtttttttgacaatttagatcatcaaattttgaaacaccagtggtgcaaagttattgggactgaagcgttgccgcaagaccattttgccatatacaaaagtataacaagatattctaaagttgataaaaatagagcgtatgagattttaggtatatcaaagaataaccccaagtataatagacgcaagatctgcacccctgttgattttagaaataagattagaaaaaatggtcttattatagttaataattcccaaaaaggtataccccaaggctcgccaattagtgctctactttcaaatatatatatgcttgactttgatattgaaatgagagattacgcgcaggaacgtggtggccattattatcgctattgtgatgatatgctattcattgtaccaactaagtataataaaactctagcaggtgatgtagcccagcggattaagcatcttaaggtagaactcaatactaagaaaactgagattcgagattttatatacaaagacagtaccttagtggcaaatatgcctttacagtatcttgggtttatttttgatgggagtaatatattattacgttcatcttctctcgcaagatattcggaacgaatgaaaagaggtgtccgcttagcaaaagctacaatggacagcaagaataggattagagaaaataaaggtgaagctttaaaagctttatttaagaaaaaattatatgccagatattcacatattggaagaaggaattttttgacttatggttatcgcgccgcgaagatcatgaattcgaaagctataaaaagacagttaaaaccattgcagaaaagattggaaaatgaaatactaaaataaatatttgctggcccgaatcatacagggccacaatacagttgaaaacaagctataataaacaacatctaatttttatataccgcaataactagcataaccccttggggcctctaaacgggtcttgaggggttttttgctgaaacctcaggcatttgagaagcacacggtcacactgcttccggtagtcaataaaccggtaaaccagcaatagacataagcggctatttaacgaccctgccctgaaccgacgaccgggtcgaatttgctttcgaatttctgccattcatccgcttattatcacttattcaggcgtagcaccaggcgtttaagggcaccaataactgccttaaaaaaattacgccccgccctgccactcatcgcaatactgttgtaattcatttaacattctgccgacatggaagccatcacagacggcatgatgaacctgaatcgccagcggcatcagcaccttgtcgccttgcgtataatatttgcccatagtgaaaacgggggcgaagaagttgtccatattggccacgtttaaatcaaaactggtgaaactcacccagggattggctgagacgaaaaacatattctcaataaaccctttagggaaataggccaggttttcaccgtaacacgccacatcttgcgaatatatgtgtagaaactgccggaaatcgtcgtggtattcactccagagcgatgaaaacgtttcagtttgctcatggaaaacggtgtaacaagggtgaacactatcccatatcaccagctcaccgtctttcatcgccatacggaactctggatgagcattcatcaggcgggcaagaatgtgaataaaggccggataaaacttgtgcttatttttctttacggtctttaaaaaggccgtaatatccagctgaacggtctggttataggtacattgagcaactgactgaaatgcctcaaaatgttctttacgatgccattgggatatatcaacggtggtatatccagtgatttttttctccattttagcttccttagctcctgaaaatctcgataactcaaaaaatacgcccggtagtgatcttatttcattatggtgaaagttggaacctcttacgtgccgatcaacgtctcattttcgccaaaagttggcccagggcttcccggtatcaacagggacaccaggatttatttattctgcgaagtgatcttccgtcacaggtatttattcggcgcaaagtgcgtcgggtgatgctgccaacttactgatttagtgtatgatggtgtttttgaggtgctccagtggcttctgtttctatcagctgtccctcctgttcagctactgacggggtggtgcgtaacggcaaaagcaccgccggacatcagcgctagcggagtgtatactggcttactatgttggcactgatgagggtgtcagtgaagtgcttcatgtggcaggagaaaaaaggctgcaccggtgcgtcagcagaatatgtgatacaggatatattccgcttcctcgctcactgactcgctacgctcggtcgttcgactgcggcgagcggaaatggcttacgaacggggcggagatttcctggaagatgccaggaagatacttaacagggaagtgagagggccgcggcaaagccgtttttccataggctccgcccccctgacaagcatcacgaaatctgacgctcaaatcagtggtggcgaaacccgacaggactataaagataccaggcgtttccccctggcggctccctcgtgcgctctcctgttcctgcctttcggtttaccggtgtcattccgctgttatggccgcgtttgtctcattccacgcctgacactcagttccgggtaggcagttcgctccaagctggactgtatgcacgaaccccccgttcagtccgaccgctgcgccttatccggtaactatcgtcttgagtccaacccggaaagacatgcaaaagcaccactggcagcagccactggtaattgatttagaggagttagtcttgaagtcatgcgccggttaaggctaaactgaaaggacaagttttggtgactgcgctcctccaagccagttacctcggttcaaagagttggtagctcagagaaccttcgaaaaaccgccctgcaaggcggttttttcgttttcagagcaagagattacgcgcagaccaaaacgatctcaagaagatcatcttattaatcagataaaatatttctagatttcagtgcaatttatctcttcaaatgtagcacctgaagtcagccccatacgatataagttgtaattctcatgttagtcatgccccgcgcccaccggaaggagctgactgggttgaaggctctcaagggcatcggtcgagatcccggtgcctaatgagtgagctaacttacattaattgcgttgcgca

SEQ ID NO: 952 - DNA, 4198 bp, Synthetic construct
  source 1..4198: mol_type = other DNA
acacgatataaaaccatctcattgcttgctgggttaactgagttgctgaatttttttctagaatttcgcaaaatttaataggtaaaccttgtttttttaaatttacgatgatataaaaataatgccctaaacaaaggtttaggggtattgtacaggttgtcaagcctcccacaggtcttggtgaaaccaatcactgtgacgacggtaagcaacacttggatgatattcataattgactccacgctactgattacattatacagcatatctaacatttgcggcgaggttcacaatttgtatttaggtactgattgtggatgagaaggttggagaaagaccactttatggttggcgacattttatcgagaacgttaggagggccttcttcggctcttcgtactctatttcattcagggaatataatggactacaaagaccatgacggtgattataaagatcatgacatcgattacaaggatgacgatgacaagggaggaagcggatcgatgaataatgatgattacccatggttcagaaaacgtggttatttgcatttcgatgaacctgtttcattaaaaaaagcggttaaatatgtttcctctccagaaaaaataataaaacattcttttctgccatttttaagctttgaagtaaaatcgtttaaaatcaaaaaagacaaatcaacaaaacaattaagtaaaactgaaaaattaagacctattgcctattcctcacatttggatagtcatatttatgcattttacgcagaatatcttactggacattatgaattattgatccaagaaaacaatttacacgagaacatccttgccttcagatctttaaataaaagcaatatagaatttgccaagagagcatttgatacaattactgaaatgggtgagtgtagcgctgttgcattagatctttctggtttttttgacaatttagatcatcaaattttgaaacaccagtggtgcaaagttattgggactgaagcgttgccgcaagaccattttgccatatacaaaagtataacaagatattctaaagttgataaaaatagagcgtatgagattttaggtatatcaaagaataaccccaagtataatagacgcaagatctgcacccctgttgattttagaaataagattagaaaaaatggtcttattatagttaataattcccaaaaaggtataccccaaggctcgccaattagtgctctactttcaaatatatatatgcttgactttgatattgaaatgagagattacgcgcaggaacgtggtggccattattatcgctattgtgatgatatgctattcattgtaccaactaagtataataaaactctagcaggtgatgtagcccagcggattaagcatcttaaggtagaactcaatactaagaaaactgagattcgagattttatatacaaagacagtaccttagtggcaaatatgcctttacagtatcttgggtttatttttgatgggagtaatatattattacgttcatcttctctcgcaagatattcggaacgaatgaaaagaggtgtccgcttagcaaaagctacaatggacagcaagaataggattagagaaaataaaggtgaagctttaaaagctttatttaagaaaaaattatatgccagatattcacatattggaagaaggaattttttgacttatggttatcgcgccgcgaagatcatgaattcgaaagctataaaaagacagttaaaaccattgcagaaaagattggaaaatgaaatactaaaataaatatttgctggcccgaatcatacagggccacaatacagttgaaaacaagctataataaacaacatctaatttttatataccgcaataactagcataaccccttggggcctctaaacgggtcttgaggggttttttgctgaaacctcaggcatttgagaagcacacggtcacactgcttccggtagtcaataaaccggtaaaccagcaatagacataagcggctatttaacgaccctgccctgaaccgacgaccgggtcgaatttgctttcgaatttctgccattcatccgcttattatcacttattcaggcgtagcaccaggcgtttaagggcaccaataactgccttaaaaaaattacgccccgccctgccactcatcgcaatactgttgtaattcatttaacattctgccgacatggaagccatcacagacggcatgatgaacctgaatcgccagcggcatcagcaccttgtcgccttgcgtataatatttgcccatagtgaaaacgggggcgaagaagttgtccatattggccacgtttaaatcaaaactggtgaaactcacccagggattggctgagacgaaaaacatattctcaataaaccctttagggaaataggccaggttttcaccgtaacacgccacatcttgcgaatatatgtgtagaaactgccggaaatcgtcgtggtattcactccagagcgatgaaaacgtttcagtttgctcatggaaaacggtgtaacaagggtgaacactatcccatatcaccagctcaccgtctttcatcgccatacggaactctggatgagcattcatcaggcgggcaagaatgtgaataaaggccggataaaacttgtgcttatttttctttacggtctttaaaaaggccgtaatatccagctgaacggtctggttataggtacattgagcaactgactgaaatgcctcaaaatgttctttacgatgccattgggatatatcaacggtggtatatccagtgatttttttctccattttagcttccttagctcctgaaaatctcgataactcaaaaaatacgcccggtagtgatcttatttcattatggtgaaagttggaacctcttacgtgccgatcaacgtctcattttcgccaaaagttggcccagggcttcccggtatcaacagggacaccaggatttatttattctgcgaagtgatcttccgtcacaggtatttattcggcgcaaagtgcgtcgggtgatgctgccaacttactgatttagtgtatgatggtgtttttgaggtgctccagtggcttctgtttctatcagctgtccctcctgttcagctactgacggggtggtgcgtaacggcaaaagcaccgccggacatcagcgctagcggagtgtatactggcttactatgttggcactgatgagggtgtcagtgaagtgcttcatgtggcaggagaaaaaaggctgcaccggtgcgtcagcagaatatgtgatacaggatatattccgcttcctcgctcactgactcgctacgctcggtcgttcgactgcggcgagcggaaatggcttacgaacggggcggagatttcctggaagatgccaggaagatacttaacagggaagtgagagggccgcggcaaagccgtttttccataggctccgcccccctgacaagcatcacgaaatctgacgctcaaatcagtggtggcgaaacccgacaggactataaagataccaggcgtttccccctggcggctccctcgtgcgctctcctgttcctgcctttcggtttaccggtgtcattccgctgttatggccgcgtttgtctcattccacgcctgacactcagttccgggtaggcagttcgctccaagctggactgtatgcacgaaccccccgttcagtccgaccgctgcgccttatccggtaactatcgtcttgagtccaacccggaaagacatgcaaaagcaccactggcagcagccactggtaattgatttagaggagttagtcttgaagtcatgcgccggttaaggctaaactgaaaggacaagttttggtgactgcgctcctccaagccagttacctcggttcaaagagttggtagctcagagaaccttcgaaaaaccgccctgcaaggcggttttttcgttttcagagcaagagattacgcgcagaccaaaacgatctcaagaagatcatcttattaatcagataaaatatttctagatttcagtgcaatttatctcttcaaatgtagcacctgaagtcagccccatacgatataagttgtaattctcatgttagtcatgccccgcgcccaccggaaggagctgactgggttgaaggctctcaagggcatcggtcgagatcccggtgcctaatgagtgagctaacttacattaattgcgttgcgca

SEQ ID NO: 953 - DNA, 4203 bp, Synthetic construct
  source 1..4203: mol_type = other DNA
acacgatataaaaccatctcattgcttgctgggttaactgagttgctgaatttttttctagaatttcgcaaaatttaataggtaaaccttgtttttttaaatttacgatgatataaaaataatgccctaaacaaaggtttaggggtattgtacaggttgtcaagcctcccacaggtcttggtgaaaccaatcactgtgacgacggtaagcaacacttggatgatattcataattgactccacgctactgattacattatacagcatatctaacatttgcggcgaggttcacaatttgtatttaggtactgattgtggatgagaaggttggagaaagaccacttggttaagccggaggatgtgtcctagaattgtcgctattctgtcatcctccggttttgctaatattctttcattcagggaatataatggactacaaagaccatgacggtgattataaagatcatgacatcgattacaaggatgacgatgacaagggaggaagcggatcgatgaataatgatgattacccatggttcagaaaacgtggttatttgcatttcgatgaacctgtttcattaaaaaaagcggttaaatatgtttcctctccagaaaaaataataaaacattcttttctgccatttttaagctttgaagtaaaatcgtttaaaatcaaaaaagacaaatcaacaaaacaattaagtaaaactgaaaaattaagacctattgcctattcctcacatttggatagtcatatttatgcattttacgcagaatatcttactggacattatgaattattgatccaagaaaacaatttacacgagaacatccttgccttcagatctttaaataaaagcaatatagaatttgccaagagagcatttgatacaattactgaaatgggtgagtgtagcgctgttgcattagatctttctggtttttttgacaatttagatcatcaaattttgaaacaccagtggtgcaaagttattgggactgaagcgttgccgcaagaccattttgccatatacaaaagtataacaagatattctaaagttgataaaaatagagcgtatgagattttaggtatatcaaagaataaccccaagtataatagacgcaagatctgcacccctgttgattttagaaataagattagaaaaaatggtcttattatagttaataattcccaaaaaggtataccccaaggctcgccaattagtgctctactttcaaatatatatatgcttgactttgatattgaaatgagagattacgcgcaggaacgtggtggccattattatcgctattgtgatgatatgctattcattgtaccaactaagtataataaaactctagcaggtgatgtagcccagcggattaagcatcttaaggtagaactcaatactaagaaaactgagattcgagattttatatacaaagacagtaccttagtggcaaatatgcctttacagtatcttgggtttatttttgatgggagtaatatattattacgttcatcttctctcgcaagatattcggaacgaatgaaaagaggtgtccgcttagcaaaagctacaatggacagcaagaataggattagagaaaataaaggtgaagctttaaaagctttatttaagaaaaaattatatgccagatattcacatattggaagaaggaattttttgacttatggttatcgcgccgcgaagatcatgaattcgaaagctataaaaagacagttaaaaccattgcagaaaagattggaaaatgaaatactaaaataaatatttgctggcccgaatcatacagggccacaatacagttgaaaacaagctataataaacaacatctaatttttatataccgcaataactagcataaccccttggggcctctaaacgggtcttgaggggttttttgctgaaacctcaggcatttgagaagcacacggtcacactgcttccggtagtcaataaaccggtaaaccagcaatagacataagcggctatttaacgaccctgccctgaaccgacgaccgggtcgaatttgctttcgaatttctgccattcatccgcttattatcacttattcaggcgtagcaccaggcgtttaagggcaccaataactgccttaaaaaaattacgccccgccctgccactcatcgcaatactgttgtaattcatttaacattctgccgacatggaagccatcacagacggcatgatgaacctgaatcgccagcggcatcagcaccttgtcgccttgcgtataatatttgcccatagtgaaaacgggggcgaagaagttgtccatattggccacgtttaaatcaaaactggtgaaactcacccagggattggctgagacgaaaaacatattctcaataaaccctttagggaaataggccaggttttcaccgtaacacgccacatcttgcgaatatatgtgtagaaactgccggaaatcgtcgtggtattcactccagagcgatgaaaacgtttcagtttgctcatggaaaacggtgtaacaagggtgaacactatcccatatcaccagctcaccgtctttcatcgccatacggaactctggatgagcattcatcaggcgggcaagaatgtgaataaaggccggataaaacttgtgcttatttttctttacggtctttaaaaaggccgtaatatccagctgaacggtctggttataggtacattgagcaactgactgaaatgcctcaaaatgttctttacgatgccattgggatatatcaacggtggtatatccagtgatttttttctccattttagcttccttagctcctgaaaatctcgataactcaaaaaatacgcccggtagtgatcttatttcattatggtgaaagttggaacctcttacgtgccgatcaacgtctcattttcgccaaaagttggcccagggcttcccggtatcaacagggacaccaggatttatttattctgcgaagtgatcttccgtcacaggtatttattcggcgcaaagtgcgtcgggtgatgctgccaacttactgatttagtgtatgatggtgtttttgaggtgctccagtggcttctgtttctatcagctgtccctcctgttcagctactgacggggtggtgcgtaacggcaaaagcaccgccggacatcagcgctagcggagtgtatactggcttactatgttggcactgatgagggtgtcagtgaagtgcttcatgtggcaggagaaaaaaggctgcaccggtgcgtcagcagaatatgtgatacaggatatattccgcttcctcgctcactgactcgctacgctcggtcgttcgactgcggcgagcggaaatggcttacgaacggggcggagatttcctggaagatgccaggaagatacttaacagggaagtgagagggccgcggcaaagccgtttttccataggctccgcccccctgacaagcatcacgaaatctgacgctcaaatcagtggtggcgaaacccgacaggactataaagataccaggcgtttccccctggcggctccctcgtgcgctctcctgttcctgcctttcggtttaccggtgtcattccgctgttatggccgcgtttgtctcattccacgcctgacactcagttccgggtaggcagttcgctccaagctggactgtatgcacgaaccccccgttcagtccgaccgctgcgccttatccggtaactatcgtcttgagtccaacccggaaagacatgcaaaagcaccactggcagcagccactggtaattgatttagaggagttagtcttgaagtcatgcgccggttaaggctaaactgaaaggacaagttttggtgactgcgctcctccaagccagttacctcggttcaaagagttggtagctcagagaaccttcgaaaaaccgccctgcaaggcggttttttcgttttcagagcaagagattacgcgcagaccaaaacgatctcaagaagatcatcttattaatcagataaaatatttctagatttcagtgcaatttatctcttcaaatgtagcacctgaagtcagccccatacgatataagttgtaattctcatgttagtcatgccccgcgcccaccggaaggagctgactgggttgaaggctctcaagggcatcggtcgagatcccggtgcctaatgagtgagctaacttacattaattgcgttgcgca

SEQ ID NO: 954 - DNA, 4114 bp, Synthetic construct
  source 1..4114: mol_type = other DNA
acacgatataaaaccatctcattgcttgctgggttaactgagttgctgaatttttttctagaatttcgcaaaatttaataggtaaaccttgtttttttaaatttacgatgatataaaaataatgccctaaacaaaggtttaggggtattccggaggttgtcaagcctcccacaggtcttggtgaaaccaatcactgtgacgacggtaagcaacacttggatgatattcataattgactccacgctactgattacattatacagcatatctaggatttgcggcgaggttcacaatttgtatttaggtactgattgtggatgagaaggttggagaaagaccacttggttaagccggaggatgtgtcctagaattgtcgctattctgtcatcctccggttttgctaatttcattcagggaatataatgaataatgatgattacccatggttcagaaaacgtggttatttgcatttcgatgaacctgtttcattaaaaaaagcggttaaatatgtttcctctccagaaaaaataataaaacattcttttctgccatttttaagctttgaagtaaaatcgtttaaaatcaaaaaagacaaatcaacaaaacaattaagtaaaactgaaaaattaagacctattgcctattcctcacatttggatagtcatatttatgcattttacgcagaatatcttactggacattatgaattattgatccaagaaaacaatttacacgagaacatccttgccttcagatctttaaataaaagcaatatagaatttgccaagagagcatttgatacaattactgaaatgggtgagtgtagcgctgttgcattagatctttctggtttttttgacaatttagatcatcaaattttgaaacaccagtggtgcaaagttattgggactgaagcgttgccgcaagaccattttgccatatacaaaagtataacaagatattctaaagttgataaaaatagagcgtatgagattttaggtatatcaaagaataaccccaagtataatagacgcaagatctgcacccctgttgattttagaaataagattagaaaaaatggtcttattatagttaataattcccaaaaaggtataccccaaggctcgccaattagtgctctactttcaaatatatatatgcttgactttgatattgaaatgagagattacgcgcaggaacgtggtggccattattatcgctattgtgatgatatgctattcattgtaccaactaagtataataaaactctagcaggtgatgtagcccagcggattaagcatcttaaggtagaactcaatactaagaaaactgagattcgagattttatatacaaagacagtaccttagtggcaaatatgcctttacagtatcttgggtttatttttgatgggagtaatatattattacgttcatcttctctcgcaagatattcggaacgaatgaaaagaggtgtccgcttagcaaaagctacaatggacagcaagaataggattagagaaaataaaggtgaagctttaaaagctttatttaagaaaaaattatatgccagatattcacatattggaagaaggaattttttgacttatggttatcgcgccgcgaagatcatgaattcgaaagctataaaaagacagttaaaaccattgcagaaaagattggaaaatgaaatactaaaataaatatttgctggcccgaatcatacagggccacaatacagttgaaaacaagctataataaacaacatctaatttttatataccgcaataactagcataaccccttggggcctctaaacgggtcttgaggggttttttgctgaaacctcaggcatttgagaagcacacggtcacactgcttccggtagtcaataaaccggtaaaccagcaatagacataagcggctatttaacgaccctgccctgaaccgacgaccgggtcgaatttgctttcgaatttctgccattcatccgcttattatcacttattcaggcgtagcaccaggcgtttaagggcaccaataactgccttaaaaaaattacgccccgccctgccactcatcgcaatactgttgtaattcatttaacattctgccgacatggaagccatcacagacggcatgatgaacctgaatcgccagcggcatcagcaccttgtcgccttgcgtataatatttgcccatagtgaaaacgggggcgaagaagttgtccatattggccacgtttaaatcaaaactggtgaaactcacccagggattggctgagacgaaaaacatattctcaataaaccctttagggaaataggccaggttttcaccgtaacacgccacatcttgcgaatatatgtgtagaaactgccggaaatcgtcgtggtattcactccagagcgatgaaaacgtttcagtttgctcatggaaaacggtgtaacaagggtgaacactatcccatatcaccagctcaccgtctttcatcgccatacggaactctggatgagcattcatcaggcgggcaagaatgtgaataaaggccggataaaacttgtgcttatttttctttacggtctttaaaaaggccgtaatatccagctgaacggtctggttataggtacattgagcaactgactgaaatgcctcaaaatgttctttacgatgccattgggatatatcaacggtggtatatccagtgatttttttctccattttagcttccttagctcctgaaaatctcgataactcaaaaaatacgcccggtagtgatcttatttcattatggtgaaagttggaacctcttacgtgccgatcaacgtctcattttcgccaaaagttggcccagggcttcccggtatcaacagggacaccaggatttatttattctgcgaagtgatcttccgtcacaggtatttattcggcgcaaagtgcgtcgggtgatgctgccaacttactgatttagtgtatgatggtgtttttgaggtgctccagtggcttctgtttctatcagctgtccctcctgttcagctactgacggggtggtgcgtaacggcaaaagcaccgccggacatcagcgctagcggagtgtatactggcttactatgttggcactgatgagggtgtcagtgaagtgcttcatgtggcaggagaaaaaaggctgcaccggtgcgtcagcagaatatgtgatacaggatatattccgcttcctcgctcactgactcgctacgctcggtcgttcgactgcggcgagcggaaatggcttacgaacggggcggagatttcctggaagatgccaggaagatacttaacagggaagtgagagggccgcggcaaagccgtttttccataggctccgcccccctgacaagcatcacgaaatctgacgctcaaatcagtggtggcgaaacccgacaggactataaagataccaggcgtttccccctggcggctccctcgtgcgctctcctgttcctgcctttcggtttaccggtgtcattccgctgttatggccgcgtttgtctcattccacgcctgacactcagttccgggtaggcagttcgctccaagctggactgtatgcacgaaccccccgttcagtccgaccgctgcgccttatccggtaactatcgtcttgagtccaacccggaaagacatgcaaaagcaccactggcagcagccactggtaattgatttagaggagttagtcttgaagtcatgcgccggttaaggctaaactgaaaggacaagttttggtgactgcgctcctccaagccagttacctcggttcaaagagttggtagctcagagaaccttcgaaaaaccgccctgcaaggcggttttttcgttttcagagcaagagattacgcgcagaccaaaacgatctcaagaagatcatcttattaatcagataaaatatttctagatttcagtgcaatttatctcttcaaatgtagcacctgaagtcagccccatacgatataagttgtaattctcatgttagtcatgccccgcgcccaccggaaggagctgactgggttgaaggctctcaagggcatcggtcgagatcccggtgcctaatgagtgagctaacttacattaattgcgttgcgca

SEQ ID NO: 955 - DNA, 4198 bp, Synthetic construct
  source 1..4198: mol_type = other DNA
acacgatataaaaccatctcattgcttgctgggttaactgagttgctgaatttttttctagaatttcgcaaaatttaataggtaaaccttgtttttttaaatttacgatgatataaaaataatgccctaaacaaaggtttaggggtattgtacaggttgtcaagcctcccacaggtcttggtgaaaccaatcactgtgacgtgaatctttactcccaagcggatattcataattgactccacgctactgattacattatacagcatatctaacatttgcggcgaggttcacaatttgtatttaggtactgattgtggatgagaaggttggagaaagaccacttggttaagccggaggatgtgtcctagaattgtcgctattctgtcatcctccggttttgctaatttcattcagggaatataatggactacaaagaccatgacggtgattataaagatcatgacatcgattacaaggatgacgatgacaagggaggaagcggatcgatgaataatgatgattacccatggttcagaaaacgtggttatttgcatttcgatgaacctgtttcattaaaaaaagcggttaaatatgtttcctctccagaaaaaataataaaacattcttttctgccatttttaagctttgaagtaaaatcgtttaaaatcaaaaaagacaaatcaacaaaacaattaagtaaaactgaaaaattaagacctattgcctattcctcacatttggatagtcatatttatgcattttacgcagaatatcttactggacattatgaattattgatccaagaaaacaatttacacgagaacatccttgccttcagatctttaaataaaagcaatatagaatttgccaagagagcatttgatacaattactgaaatgggtgagtgtagcgctgttgcattagatctttctggtttttttgacaatttagatcatcaaattttgaaacaccagtggtgcaaagttattgggactgaagcgttgccgcaagaccattttgccatatacaaaagtataacaagatattctaaagttgataaaaatagagcgtatgagattttaggtatatcaaagaataaccccaagtataatagacgcaagatctgcacccctgttgattttagaaataagattagaaaaaatggtcttattatagttaataattcccaaaaaggtataccccaaggctcgccaattagtgctctactttcaaatatatatatgcttgactttgatattgaaatgagagattacgcgcaggaacgtggtggccattattatcgctattgtgatgatatgctattcattgtaccaactaagtataataaaactctagcaggtgatgtagcccagcggattaagcatcttaaggtagaactcaatactaagaaaactgagattcgagattttatatacaaagacagtaccttagtggcaaatatgcctttacagtatcttgggtttatttttgatgggagtaatatattattacgttcatcttctctcgcaagatattcggaacgaatgaaaagaggtgtccgcttagcaaaagctacaatggacagcaagaataggattagagaaaataaaggtgaagctttaaaagctttatttaagaaaaaattatatgccagatattcacatattggaagaaggaattttttgacttatggttatcgcgccgcgaagatcatgaattcgaaagctataaaaagacagttaaaaccattgcagaaaagattggaaaatgaaatactaaaataaatatttgctggcccgaatcatacagggccacaatacagttgaaaacaagctataataaacaacatctaatttttatataccgcaataactagcataaccccttggggcctctaaacgggtcttgaggggttttttgctgaaacctcaggcatttgagaagcacacggtcacactgcttccggtagtcaataaaccggtaaaccagcaatagacataagcggctatttaacgaccctgccctgaaccgacgaccgggtcgaatttgctttcgaatttctgccattcatccgcttattatcacttattcaggcgtagcaccaggcgtttaagggcaccaataactgccttaaaaaaattacgccccgccctgccactcatcgcaatactgttgtaattcatttaacattctgccgacatggaagccatcacagacggcatgatgaacctgaatcgccagcggcatcagcaccttgtcgccttgcgtataatatttgcccatagtgaaaacgggggcgaagaagttgtccatattggccacgtttaaatcaaaactggtgaaactcacccagggattggctgagacgaaaaacatattctcaataaaccctttagggaaataggccaggttttcaccgtaacacgccacatcttgcgaatatatgtgtagaaactgccggaaatcgtcgtggtattcactccagagcgatgaaaacgtttcagtttgctcatggaaaacggtgtaacaagggtgaacactatcccatatcaccagctcaccgtctttcatcgccatacggaactctggatgagcattcatcaggcgggcaagaatgtgaataaaggccggataaaacttgtgcttatttttctttacggtctttaaaaaggccgtaatatccagctgaacggtctggttataggtacattgagcaactgactgaaatgcctcaaaatgttctttacgatgccattgggatatatcaacggtggtatatccagtgatttttttctccattttagcttccttagctcctgaaaatctcgataactcaaaaaatacgcccggtagtgatcttatttcattatggtgaaagttggaacctcttacgtgccgatcaacgtctcattttcgccaaaagttggcccagggcttcccggtatcaacagggacaccaggatttatttattctgcgaagtgatcttccgtcacaggtatttattcggcgcaaagtgcgtcgggtgatgctgccaacttactgatttagtgtatgatggtgtttttgaggtgctccagtggcttctgtttctatcagctgtccctcctgttcagctactgacggggtggtgcgtaacggcaaaagcaccgccggacatcagcgctagcggagtgtatactggcttactatgttggcactgatgagggtgtcagtgaagtgcttcatgtggcaggagaaaaaaggctgcaccggtgcgtcagcagaatatgtgatacaggatatattccgcttcctcgctcactgactcgctacgctcggtcgttcgactgcggcgagcggaaatggcttacgaacggggcggagatttcctggaagatgccaggaagatacttaacagggaagtgagagggccgcggcaaagccgtttttccataggctccgcccccctgacaagcatcacgaaatctgacgctcaaatcagtggtggcgaaacccgacaggactataaagataccaggcgtttccccctggcggctccctcgtgcgctctcctgttcctgcctttcggtttaccggtgtcattccgctgttatggccgcgtttgtctcattccacgcctgacactcagttccgggtaggcagttcgctccaagctggactgtatgcacgaaccccccgttcagtccgaccgctgcgccttatccggtaactatcgtcttgagtccaacccggaaagacatgcaaaagcaccactggcagcagccactggtaattgatttagaggagttagtcttgaagtcatgcgccggttaaggctaaactgaaaggacaagttttggtgactgcgctcctccaagccagttacctcggttcaaagagttggtagctcagagaaccttcgaaaaaccgccctgcaaggcggttttttcgttttcagagcaagagattacgcgcagaccaaaacgatctcaagaagatcatcttattaatcagataaaatatttctagatttcagtgcaatttatctcttcaaatgtagcacctgaagtcagccccatacgatataagttgtaattctcatgttagtcatgccccgcgcccaccggaaggagctgactgggttgaaggctctcaagggcatcggtcgagatcccggtgcctaatgagtgagctaacttacattaattgcgttgcgca

SEQ ID NO: 956 - DNA, 4198 bp, Synthetic construct
  source 1..4198: mol_type = other DNA
acacgatataaaaccatctcattgcttgctgggttaactgagttgctgaatttttttctagaatttcgcaaaatttaataggtaaaccttgtttttttaaatttacgatgatataaaaataatgccctaaacaaaggtttaggggtattgtacaggttgtcaagcctcccacaggtcttggtgaaaccaattggactaatatgaatctttactcccaagcgaaaacgggtgattgactccacgctactgattacattatacagcatatctaacatttgcggcgaggttcacaatttgtatttaggtactgattgtggatgagaaggttggagaaagaccacttggttaagccggaggatgtgtcctagaattgtcgctattctgtcatcctccggttttgctaatttcattcagggaatataatggactacaaagaccatgacggtgattataaagatcatgacatcgattacaaggatgacgatgacaagggaggaagcggatcgatgaataatgatgattacccatggttcagaaaacgtggttatttgcatttcgatgaacctgtttcattaaaaaaagcggttaaatatgtttcctctccagaaaaaataataaaacattcttttctgccatttttaagctttgaagtaaaatcgtttaaaatcaaaaaagacaaatcaacaaaacaattaagtaaaactgaaaaattaagacctattgcctattcctcacatttggatagtcatatttatgcattttacgcagaatatcttactggacattatgaattattgatccaagaaaacaatttacacgagaacatccttgccttcagatctttaaataaaagcaatatagaatttgccaagagagcatttgatacaattactgaaatgggtgagtgtagcgctgttgcattagatctttctggtttttttgacaatttagatcatcaaattttgaaacaccagtggtgcaaagttattgggactgaagcgttgccgcaagaccattttgccatatacaaaagtataacaagatattctaaagttgataaaaatagagcgtatgagattttaggtatatcaaagaataaccccaagtataatagacgcaagatctgcacccctgttgattttagaaataagattagaaaaaatggtcttattatagttaataattcccaaaaaggtataccccaaggctcgccaattagtgctctactttcaaatatatatatgcttgactttgatattgaaatgagagattacgcgcaggaacgtggtggccattattatcgctattgtgatgatatgctattcattgtaccaactaagtataataaaactctagcaggtgatgtagcccagcggattaagcatcttaaggtagaactcaatactaagaaaactgagattcgagattttatatacaaagacagtaccttagtggcaaatatgcctttacagtatcttgggtttatttttgatgggagtaatatattattacgttcatcttctctcgcaagatattcggaacgaatgaaaagaggtgtccgcttagcaaaagctacaatggacagcaagaataggattagagaaaataaaggtgaagctttaaaagctttatttaagaaaaaattatatgccagatattcacatattggaagaaggaattttttgacttatggttatcgcgccgcgaagatcatgaattcgaaagctataaaaagacagttaaaaccattgcagaaaagattggaaaatgaaatactaaaataaatatttgctggcccgaatcatacagggccacaatacagttgaaaacaagctataataaacaacatctaatttttatataccgcaataactagcataaccccttggggcctctaaacgggtcttgaggggttttttgctgaaacctcaggcatttgagaagcacacggtcacactgcttccggtagtcaataaaccggtaaaccagcaatagacataagcggctatttaacgaccctgccctgaaccgacgaccgggtcgaatttgctttcgaatttctgccattcatccgcttattatcacttattcaggcgtagcaccaggcgtttaagggcaccaataactgccttaaaaaaattacgccccgccctgccactcatcgcaatactgttgtaattcatttaacattctgccgacatggaagccatcacagacggcatgatgaacctgaatcgccagcggcatcagcaccttgtcgccttgcgtataatatttgcccatagtgaaaacgggggcgaagaagttgtccatattggccacgtttaaatcaaaactggtgaaactcacccagggattggctgagacgaaaaacatattctcaataaaccctttagggaaataggccaggttttcaccgtaacacgccacatcttgcgaatatatgtgtagaaactgccggaaatcgtcgtggtattcactccagagcgatgaaaacgtttcagtttgctcatggaaaacggtgtaacaagggtgaacactatcccatatcaccagctcaccgtctttcatcgccatacggaactctggatgagcattcatcaggcgggcaagaatgtgaataaaggccggataaaacttgtgcttatttttctttacggtctttaaaaaggccgtaatatccagctgaacggtctggttataggtacattgagcaactgactgaaatgcctcaaaatgttctttacgatgccattgggatatatcaacggtggtatatccagtgatttttttctccattttagcttccttagctcctgaaaatctcgataactcaaaaaatacgcccggtagtgatcttatttcattatggtgaaagttggaacctcttacgtgccgatcaacgtctcattttcgccaaaagttggcccagggcttcccggtatcaacagggacaccaggatttatttattctgcgaagtgatcttccgtcacaggtatttattcggcgcaaagtgcgtcgggtgatgctgccaacttactgatttagtgtatgatggtgtttttgaggtgctccagtggcttctgtttctatcagctgtccctcctgttcagctactgacggggtggtgcgtaacggcaaaagcaccgccggacatcagcgctagcggagtgtatactggcttactatgttggcactgatgagggtgtcagtgaagtgcttcatgtggcaggagaaaaaaggctgcaccggtgcgtcagcagaatatgtgatacaggatatattccgcttcctcgctcactgactcgctacgctcggtcgttcgactgcggcgagcggaaatggcttacgaacggggcggagatttcctggaagatgccaggaagatacttaacagggaagtgagagggccgcggcaaagccgtttttccataggctccgcccccctgacaagcatcacgaaatctgacgctcaaatcagtggtggcgaaacccgacaggactataaagataccaggcgtttccccctggcggctccctcgtgcgctctcctgttcctgcctttcggtttaccggtgtcattccgctgttatggccgcgtttgtctcattccacgcctgacactcagttccgggtaggcagttcgctccaagctggactgtatgcacgaaccccccgttcagtccgaccgctgcgccttatccggtaactatcgtcttgagtccaacccggaaagacatgcaaaagcaccactggcagcagccactggtaattgatttagaggagttagtcttgaagtcatgcgccggttaaggctaaactgaaaggacaagttttggtgactgcgctcctccaagccagttacctcggttcaaagagttggtagctcagagaaccttcgaaaaaccgccctgcaaggcggttttttcgttttcagagcaagagattacgcgcagaccaaaacgatctcaagaagatcatcttattaatcagataaaatatttctagatttcagtgcaatttatctcttcaaatgtagcacctgaagtcagccccatacgatataagttgtaattctcatgttagtcatgccccgcgcccaccggaaggagctgactgggttgaaggctctcaagggcatcggtcgagatcccggtgcctaatgagtgagctaacttacattaattgcgttgcgca

SEQ ID NO: 957 - DNA, 4198 bp, Synthetic construct
  source 1..4198: mol_type = other DNA
acacgatataaaaccatctcattgcttgctgggttaactgagttgctgaatttttttctagaatttcgcaaaatttaataggtaaaccttgtttttttaaatttacgatgatataaaaataatgccctaaacaaaggtttaggggtattgtacaggttgtcaagcctcccacaggtcttggtagcatcaggtggactaatatgaatctttactcccaagcgaaaacgggtgcgtggactagcgctactgattacattatacagcatatctaacatttgcggcgaggttcacaatttgtatttaggtactgattgtggatgagaaggttggagaaagaccacttggttaagccggaggatgtgtcctagaattgtcgctattctgtcatcctccggttttgctaatttcattcagggaatataatggactacaaagaccatgacggtgattataaagatcatgacatcgattacaaggatgacgatgacaagggaggaagcggatcgatgaataatgatgattacccatggttcagaaaacgtggttatttgcatttcgatgaacctgtttcattaaaaaaagcggttaaatatgtttcctctccagaaaaaataataaaacattcttttctgccatttttaagctttgaagtaaaatcgtttaaaatcaaaaaagacaaatcaacaaaacaattaagtaaaactgaaaaattaagacctattgcctattcctcacatttggatagtcatatttatgcattttacgcagaatatcttactggacattatgaattattgatccaagaaaacaatttacacgagaacatccttgccttcagatctttaaataaaagcaatatagaatttgccaagagagcatttgatacaattactgaaatgggtgagtgtagcgctgttgcattagatctttctggtttttttgacaatttagatcatcaaattttgaaacaccagtggtgcaaagttattgggactgaagcgttgccgcaagaccattttgccatatacaaaagtataacaagatattctaaagttgataaaaatagagcgtatgagattttaggtatatcaaagaataaccccaagtataatagacgcaagatctgcacccctgttgattttagaaataagattagaaaaaatggtcttattatagttaataattcccaaaaaggtataccccaaggctcgccaattagtgctctactttcaaatatatatatgcttgactttgatattgaaatgagagattacgcgcaggaacgtggtggccattattatcgctattgtgatgatatgctattcattgtaccaactaagtataataaaactctagcaggtgatgtagcccagcggattaagcatcttaaggtagaactcaatactaagaaaactgagattcgagattttatatacaaagacagtaccttagtggcaaatatgcctttacagtatcttgggtttatttttgatgggagtaatatattattacgttcatcttctctcgcaagatattcggaacgaatgaaaagaggtgtccgcttagcaaaagctacaatggacagcaagaataggattagagaaaataaaggtgaagctttaaaagctttatttaagaaaaaattatatgccagatattcacatattggaagaaggaattttttgacttatggttatcgcgccgcgaagatcatgaattcgaaagctataaaaagacagttaaaaccattgcagaaaagattggaaaatgaaatactaaaataaatatttgctggcccgaatcatacagggccacaatacagttgaaaacaagctataataaacaacatctaatttttatataccgcaataactagcataaccccttggggcctctaaacgggtcttgaggggttttttgctgaaacctcaggcatttgagaagcacacggtcacactgcttccggtagtcaataaaccggtaaaccagcaatagacataagcggctatttaacgaccctgccctgaaccgacgaccgggtcgaatttgctttcgaatttctgccattcatccgcttattatcacttattcaggcgtagcaccaggcgtttaagggcaccaataactgccttaaaaaaattacgccccgccctgccactcatcgcaatactgttgtaattcatttaacattctgccgacatggaagccatcacagacggcatgatgaacctgaatcgccagcggcatcagcaccttgtcgccttgcgtataatatttgcccatagtgaaaacgggggcgaagaagttgtccatattggccacgtttaaatcaaaactggtgaaactcacccagggattggctgagacgaaaaacatattctcaataaaccctttagggaaataggccaggttttcaccgtaacacgccacatcttgcgaatatatgtgtagaaactgccggaaatcgtcgtggtattcactccagagcgatgaaaacgtttcagtttgctcatggaaaacggtgtaacaagggtgaacactatcccatatcaccagctcaccgtctttcatcgccatacggaactctggatgagcattcatcaggcgggcaagaatgtgaataaaggccggataaaacttgtgcttatttttctttacggtctttaaaaaggccgtaatatccagctgaacggtctggttataggtacattgagcaactgactgaaatgcctcaaaatgttctttacgatgccattgggatatatcaacggtggtatatccagtgatttttttctccattttagcttccttagctcctgaaaatctcgataactcaaaaaatacgcccggtagtgatcttatttcattatggtgaaagttggaacctcttacgtgccgatcaacgtctcattttcgccaaaagttggcccagggcttcccggtatcaacagggacaccaggatttatttattctgcgaagtgatcttccgtcacaggtatttattcggcgcaaagtgcgtcgggtgatgctgccaacttactgatttagtgtatgatggtgtttttgaggtgctccagtggcttctgtttctatcagctgtccctcctgttcagctactgacggggtggtgcgtaacggcaaaagcaccgccggacatcagcgctagcggagtgtatactggcttactatgttggcactgatgagggtgtcagtgaagtgcttcatgtggcaggagaaaaaaggctgcaccggtgcgtcagcagaatatgtgatacaggatatattccgcttcctcgctcactgactcgctacgctcggtcgttcgactgcggcgagcggaaatggcttacgaacggggcggagatttcctggaagatgccaggaagatacttaacagggaagtgagagggccgcggcaaagccgtttttccataggctccgcccccctgacaagcatcacgaaatctgacgctcaaatcagtggtggcgaaacccgacaggactataaagataccaggcgtttccccctggcggctccctcgtgcgctctcctgttcctgcctttcggtttaccggtgtcattccgctgttatggccgcgtttgtctcattccacgcctgacactcagttccgggtaggcagttcgctccaagctggactgtatgcacgaaccccccgttcagtccgaccgctgcgccttatccggtaactatcgtcttgagtccaacccggaaagacatgcaaaagcaccactggcagcagccactggtaattgatttagaggagttagtcttgaagtcatgcgccggttaaggctaaactgaaaggacaagttttggtgactgcgctcctccaagccagttacctcggttcaaagagttggtagctcagagaaccttcgaaaaaccgccctgcaaggcggttttttcgttttcagagcaagagattacgcgcagaccaaaacgatctcaagaagatcatcttattaatcagataaaatatttctagatttcagtgcaatttatctcttcaaatgtagcacctgaagtcagccccatacgatataagttgtaattctcatgttagtcatgccccgcgcccaccggaaggagctgactgggttgaaggctctcaagggcatcggtcgagatcccggtgcctaatgagtgagctaacttacattaattgcgttgcgca

SEQ ID NO: 958 - DNA, 4198 bp, Synthetic construct
  source 1..4198: mol_type = other DNA
acacgatataaaaccatctcattgcttgctgggttaactgagttgctgaatttttttctagaatttcgcaaaatttaataggtaaaccttgtttttttaaatttacgatgatataaaaataatgccctaaacaaaggtttaggggtattgtacaggttgtcaagcctcccatattttacgttagcatcaggtggactaatatgaatctttactcccaagcgaaaacgggtgcgtggactagcgaggagcaatacattatacagcatatctaacatttgcggcgaggttcacaatttgtatttaggtactgattgtggatgagaaggttggagaaagaccacttggttaagccggaggatgtgtcctagaattgtcgctattctgtcatcctccggttttgctaatttcattcagggaatataatggactacaaagaccatgacggtgattataaagatcatgacatcgattacaaggatgacgatgacaagggaggaagcggatcgatgaataatgatgattacccatggttcagaaaacgtggttatttgcatttcgatgaacctgtttcattaaaaaaagcggttaaatatgtttcctctccagaaaaaataataaaacattcttttctgccatttttaagctttgaagtaaaatcgtttaaaatcaaaaaagacaaatcaacaaaacaattaagtaaaactgaaaaattaagacctattgcctattcctcacatttggatagtcatatttatgcattttacgcagaatatcttactggacattatgaattattgatccaagaaaacaatttacacgagaacatccttgccttcagatctttaaataaaagcaatatagaatttgccaagagagcatttgatacaattactgaaatgggtgagtgtagcgctgttgcattagatctttctggtttttttgacaatttagatcatcaaattttgaaacaccagtggtgcaaagttattgggactgaagcgttgccgcaagaccattttgccatatacaaaagtataacaagatattctaaagttgataaaaatagagcgtatgagattttaggtatatcaaagaataaccccaagtataatagacgcaagatctgcacccctgttgattttagaaataagattagaaaaaatggtcttattatagttaataattcccaaaaaggtataccccaaggctcgccaattagtgctctactttcaaatatatatatgcttgactttgatattgaaatgagagattacgcgcaggaacgtggtggccattattatcgctattgtgatgatatgctattcattgtaccaactaagtataataaaactctagcaggtgatgtagcccagcggattaagcatcttaaggtagaactcaatactaagaaaactgagattcgagattttatatacaaagacagtaccttagtggcaaatatgcctttacagtatcttgggtttatttttgatgggagtaatatattattacgttcatcttctctcgcaagatattcggaacgaatgaaaagaggtgtccgcttagcaaaagctacaatggacagcaagaataggattagagaaaataaaggtgaagctttaaaagctttatttaagaaaaaattatatgccagatattcacatattggaagaaggaattttttgacttatggttatcgcgccgcgaagatcatgaattcgaaagctataaaaagacagttaaaaccattgcagaaaagattggaaaatgaaatactaaaataaatatttgctggcccgaatcatacagggccacaatacagttgaaaacaagctataataaacaacatctaatttttatataccgcaataactagcataaccccttggggcctctaaacgggtcttgaggggttttttgctgaaacctcaggcatttgagaagcacacggtcacactgcttccggtagtcaataaaccggtaaaccagcaatagacataagcggctatttaacgaccctgccctgaaccgacgaccgggtcgaatttgctttcgaatttctgccattcatccgcttattatcacttattcaggcgtagcaccaggcgtttaagggcaccaataactgccttaaaaaaattacgccccgccctgccactcatcgcaatactgttgtaattcatttaacattctgccgacatggaagccatcacagacggcatgatgaacctgaatcgccagcggcatcagcaccttgtcgccttgcgtataatatttgcccatagtgaaaacgggggcgaagaagttgtccatattggccacgtttaaatcaaaactggtgaaactcacccagggattggctgagacgaaaaacatattctcaataaaccctttagggaaataggccaggttttcaccgtaacacgccacatcttgcgaatatatgtgtagaaactgccggaaatcgtcgtggtattcactccagagcgatgaaaacgtttcagtttgctcatggaaaacggtgtaacaagggtgaacactatcccatatcaccagctcaccgtctttcatcgccatacggaactctggatgagcattcatcaggcgggcaagaatgtgaataaaggccggataaaacttgtgcttatttttctttacggtctttaaaaaggccgtaatatccagctgaacggtctggttataggtacattgagcaactgactgaaatgcctcaaaatgttctttacgatgccattgggatatatcaacggtggtatatccagtgatttttttctccattttagcttccttagctcctgaaaatctcgataactcaaaaaatacgcccggtagtgatcttatttcattatggtgaaagttggaacctcttacgtgccgatcaacgtctcattttcgccaaaagttggcccagggcttcccggtatcaacagggacaccaggatttatttattctgcgaagtgatcttccgtcacaggtatttattcggcgcaaagtgcgtcgggtgatgctgccaacttactgatttagtgtatgatggtgtttttgaggtgctccagtggcttctgtttctatcagctgtccctcctgttcagctactgacggggtggtgcgtaacggcaaaagcaccgccggacatcagcgctagcggagtgtatactggcttactatgttggcactgatgagggtgtcagtgaagtgcttcatgtggcaggagaaaaaaggctgcaccggtgcgtcagcagaatatgtgatacaggatatattccgcttcctcgctcactgactcgctacgctcggtcgttcgactgcggcgagcggaaatggcttacgaacggggcggagatttcctggaagatgccaggaagatacttaacagggaagtgagagggccgcggcaaagccgtttttccataggctccgcccccctgacaagcatcacgaaatctgacgctcaaatcagtggtggcgaaacccgacaggactataaagataccaggcgtttccccctggcggctccctcgtgcgctctcctgttcctgcctttcggtttaccggtgtcattccgctgttatggccgcgtttgtctcattccacgcctgacactcagttccgggtaggcagttcgctccaagctggactgtatgcacgaaccccccgttcagtccgaccgctgcgccttatccggtaactatcgtcttgagtccaacccggaaagacatgcaaaagcaccactggcagcagccactggtaattgatttagaggagttagtcttgaagtcatgcgccggttaaggctaaactgaaaggacaagttttggtgactgcgctcctccaagccagttacctcggttcaaagagttggtagctcagagaaccttcgaaaaaccgccctgcaaggcggttttttcgttttcagagcaagagattacgcgcagaccaaaacgatctcaagaagatcatcttattaatcagataaaatatttctagatttcagtgcaatttatctcttcaaatgtagcacctgaagtcagccccatacgatataagttgtaattctcatgttagtcatgccccgcgcccaccggaaggagctgactgggttgaaggctctcaagggcatcggtcgagatcccggtgcctaatgagtgagctaacttacattaattgcgttgcgca

SEQ ID NO: 959 - DNA, 4198 bp, Synthetic construct
  source 1..4198: mol_type = other DNA
acacgatataaaaccatctcattgcttgctgggttaactgagttgctgaatttttttctagaatttcgcaaaatttaataggtaaaccttgtttttttaaatttacgatgatataaaaataatgccctaaacaaaggtttaggggtattgtacaggttgtcgtccccagggtattttacgttagcatcaggtggactaatatgaatctttactcccaagcgaaaacgggtgcgtggactagcgaggagcaaacgaaaattcagcatatctaacatttgcggcgaggttcacaatttgtatttaggtactgattgtggatgagaaggttggagaaagaccacttggttaagccggaggatgtgtcctagaattgtcgctattctgtcatcctccggttttgctaatttcattcagggaatataatggactacaaagaccatgacggtgattataaagatcatgacatcgattacaaggatgacgatgacaagggaggaagcggatcgatgaataatgatgattacccatggttcagaaaacgtggttatttgcatttcgatgaacctgtttcattaaaaaaagcggttaaatatgtttcctctccagaaaaaataataaaacattcttttctgccatttttaagctttgaagtaaaatcgtttaaaatcaaaaaagacaaatcaacaaaacaattaagtaaaactgaaaaattaagacctattgcctattcctcacatttggatagtcatatttatgcattttacgcagaatatcttactggacattatgaattattgatccaagaaaacaatttacacgagaacatccttgccttcagatctttaaataaaagcaatatagaatttgccaagagagcatttgatacaattactgaaatgggtgagtgtagcgctgttgcattagatctttctggtttttttgacaatttagatcatcaaattttgaaacaccagtggtgcaaagttattgggactgaagcgttgccgcaagaccattttgccatatacaaaagtataacaagatattctaaagttgataaaaatagagcgtatgagattttaggtatatcaaagaataaccccaagtataatagacgcaagatctgcacccctgttgattttagaaataagattagaaaaaatggtcttattatagttaataattcccaaaaaggtataccccaaggctcgccaattagtgctctactttcaaatatatatatgcttgactttgatattgaaatgagagattacgcgcaggaacgtggtggccattattatcgctattgtgatgatatgctattcattgtaccaactaagtataataaaactctagcaggtgatgtagcccagcggattaagcatcttaaggtagaactcaatactaagaaaactgagattcgagattttatatacaaagacagtaccttagtggcaaatatgcctttacagtatcttgggtttatttttgatgggagtaatatattattacgttcatcttctctcgcaagatattcggaacgaatgaaaagaggtgtccgcttagcaaaagctacaatggacagcaagaataggattagagaaaataaaggtgaagctttaaaagctttatttaagaaaaaattatatgccagatattcacatattggaagaaggaattttttgacttatggttatcgcgccgcgaagatcatgaattcgaaagctataaaaagacagttaaaaccattgcagaaaagattggaaaatgaaatactaaaataaatatttgctggcccgaatcatacagggccacaatacagttgaaaacaagctataataaacaacatctaatttttatataccgcaataactagcataaccccttggggcctctaaacgggtcttgaggggttttttgctgaaacctcaggcatttgagaagcacacggtcacactgcttccggtagtcaataaaccggtaaaccagcaatagacataagcggctatttaacgaccctgccctgaaccgacgaccgggtcgaatttgctttcgaatttctgccattcatccgcttattatcacttattcaggcgtagcaccaggcgtttaagggcaccaataactgccttaaaaaaattacgccccgccctgccactcatcgcaatactgttgtaattcatttaacattctgccgacatggaagccatcacagacggcatgatgaacctgaatcgccagcggcatcagcaccttgtcgccttgcgtataatatttgcccatagtgaaaacgggggcgaagaagttgtccatattggccacgtttaaatcaaaactggtgaaactcacccagggattggctgagacgaaaaacatattctcaataaaccctttagggaaataggccaggttttcaccgtaacacgccacatcttgcgaatatatgtgtagaaactgccggaaatcgtcgtggtattcactccagagcgatgaaaacgtttcagtttgctcatggaaaacggtgtaacaagggtgaacactatcccatatcaccagctcaccgtctttcatcgccatacggaactctggatgagcattcatcaggcgggcaagaatgtgaataaaggccggataaaacttgtgcttatttttctttacggtctttaaaaaggccgtaatatccagctgaacggtctggttataggtacattgagcaactgactgaaatgcctcaaaatgttctttacgatgccattgggatatatcaacggtggtatatccagtgatttttttctccattttagcttccttagctcctgaaaatctcgataactcaaaaaatacgcccggtagtgatcttatttcattatggtgaaagttggaacctcttacgtgccgatcaacgtctcattttcgccaaaagttggcccagggcttcccggtatcaacagggacaccaggatttatttattctgcgaagtgatcttccgtcacaggtatttattcggcgcaaagtgcgtcgggtgatgctgccaacttactgatttagtgtatgatggtgtttttgaggtgctccagtggcttctgtttctatcagctgtccctcctgttcagctactgacggggtggtgcgtaacggcaaaagcaccgccggacatcagcgctagcggagtgtatactggcttactatgttggcactgatgagggtgtcagtgaagtgcttcatgtggcaggagaaaaaaggctgcaccggtgcgtcagcagaatatgtgatacaggatatattccgcttcctcgctcactgactcgctacgctcggtcgttcgactgcggcgagcggaaatggcttacgaacggggcggagatttcctggaagatgccaggaagatacttaacagggaagtgagagggccgcggcaaagccgtttttccataggctccgcccccctgacaagcatcacgaaatctgacgctcaaatcagtggtggcgaaacccgacaggactataaagataccaggcgtttccccctggcggctccctcgtgcgctctcctgttcctgcctttcggtttaccggtgtcattccgctgttatggccgcgtttgtctcattccacgcctgacactcagttccgggtaggcagttcgctccaagctggactgtatgcacgaaccccccgttcagtccgaccgctgcgccttatccggtaactatcgtcttgagtccaacccggaaagacatgcaaaagcaccactggcagcagccactggtaattgatttagaggagttagtcttgaagtcatgcgccggttaaggctaaactgaaaggacaagttttggtgactgcgctcctccaagccagttacctcggttcaaagagttggtagctcagagaaccttcgaaaaaccgccctgcaaggcggttttttcgttttcagagcaagagattacgcgcagaccaaaacgatctcaagaagatcatcttattaatcagataaaatatttctagatttcagtgcaatttatctcttcaaatgtagcacctgaagtcagccccatacgatataagttgtaattctcatgttagtcatgccccgcgcccaccggaaggagctgactgggttgaaggctctcaagggcatcggtcgagatcccggtgcctaatgagtgagctaacttacattaattgcgttgcgca

SEQ ID NO: 960 - DNA, 4198 bp, Synthetic construct
  source 1..4198: mol_type = other DNA
acacgatataaaaccatctcattgcttgctgggttaactgagttgctgaatttttttctagaatttcgcaaaatttaataggtaaaccttgtttttttaaatttacgatgatataaaaataatgccctaaacaaaggtttaggggtattgtacacgtcggcgtccccagggtattttacgttagcatcaggtggactaatatgaatctttactcccaagcgaaaacgggtgcgtggactagcgaggagcaaacgaaaattcttggcctgctacatttgcggcgaggttcacaatttgtatttaggtactgattgtggatgagaaggttggagaaagaccacttggttaagccggaggatgtgtcctagaattgtcgctattctgtcatcctccggttttgctaatttcattcagggaatataatggactacaaagaccatgacggtgattataaagatcatgacatcgattacaaggatgacgatgacaagggaggaagcggatcgatgaataatgatgattacccatggttcagaaaacgtggttatttgcatttcgatgaacctgtttcattaaaaaaagcggttaaatatgtttcctctccagaaaaaataataaaacattcttttctgccatttttaagctttgaagtaaaatcgtttaaaatcaaaaaagacaaatcaacaaaacaattaagtaaaactgaaaaattaagacctattgcctattcctcacatttggatagtcatatttatgcattttacgcagaatatcttactggacattatgaattattgatccaagaaaacaatttacacgagaacatccttgccttcagatctttaaataaaagcaatatagaatttgccaagagagcatttgatacaattactgaaatgggtgagtgtagcgctgttgcattagatctttctggtttttttgacaatttagatcatcaaattttgaaacaccagtggtgcaaagttattgggactgaagcgttgccgcaagaccattttgccatatacaaaagtataacaagatattctaaagttgataaaaatagagcgtatgagattttaggtatatcaaagaataaccccaagtataatagacgcaagatctgcacccctgttgattttagaaataagattagaaaaaatggtcttattatagttaataattcccaaaaaggtataccccaaggctcgccaattagtgctctactttcaaatatatatatgcttgactttgatattgaaatgagagattacgcgcaggaacgtggtggccattattatcgctattgtgatgatatgctattcattgtaccaactaagtataataaaactctagcaggtgatgtagcccagcggattaagcatcttaaggtagaactcaatactaagaaaactgagattcgagattttatatacaaagacagtaccttagtggcaaatatgcctttacagtatcttgggtttatttttgatgggagtaatatattattacgttcatcttctctcgcaagatattcggaacgaatgaaaagaggtgtccgcttagcaaaagctacaatggacagcaagaataggattagagaaaataaaggtgaagctttaaaagctttatttaagaaaaaattatatgccagatattcacatattggaagaaggaattttttgacttatggttatcgcgccgcgaagatcatgaattcgaaagctataaaaagacagttaaaaccattgcagaaaagattggaaaatgaaatactaaaataaatatttgctggcccgaatcatacagggccacaatacagttgaaaacaagctataataaacaacatctaatttttatataccgcaataactagcataaccccttggggcctctaaacgggtcttgaggggttttttgctgaaacctcaggcatttgagaagcacacggtcacactgcttccggtagtcaataaaccggtaaaccagcaatagacataagcggctatttaacgaccctgccctgaaccgacgaccgggtcgaatttgctttcgaatttctgccattcatccgcttattatcacttattcaggcgtagcaccaggcgtttaagggcaccaataactgccttaaaaaaattacgccccgccctgccactcatcgcaatactgttgtaattcatttaacattctgccgacatggaagccatcacagacggcatgatgaacctgaatcgccagcggcatcagcaccttgtcgccttgcgtataatatttgcccatagtgaaaacgggggcgaagaagttgtccatattggccacgtttaaatcaaaactggtgaaactcacccagggattggctgagacgaaaaacatattctcaataaaccctttagggaaataggccaggttttcaccgtaacacgccacatcttgcgaatatatgtgtagaaactgccggaaatcgtcgtggtattcactccagagcgatgaaaacgtttcagtttgctcatggaaaacggtgtaacaagggtgaacactatcccatatcaccagctcaccgtctttcatcgccatacggaactctggatgagcattcatcaggcgggcaagaatgtgaataaaggccggataaaacttgtgcttatttttctttacggtctttaaaaaggccgtaatatccagctgaacggtctggttataggtacattgagcaactgactgaaatgcctcaaaatgttctttacgatgccattgggatatatcaacggtggtatatccagtgatttttttctccattttagcttccttagctcctgaaaatctcgataactcaaaaaatacgcccggtagtgatcttatttcattatggtgaaagttggaacctcttacgtgccgatcaacgtctcattttcgccaaaagttggcccagggcttcccggtatcaacagggacaccaggatttatttattctgcgaagtgatcttccgtcacaggtatttattcggcgcaaagtgcgtcgggtgatgctgccaacttactgatttagtgtatgatggtgtttttgaggtgctccagtggcttctgtttctatcagctgtccctcctgttcagctactgacggggtggtgcgtaacggcaaaagcaccgccggacatcagcgctagcggagtgtatactggcttactatgttggcactgatgagggtgtcagtgaagtgcttcatgtggcaggagaaaaaaggctgcaccggtgcgtcagcagaatatgtgatacaggatatattccgcttcctcgctcactgactcgctacgctcggtcgttcgactgcggcgagcggaaatggcttacgaacggggcggagatttcctggaagatgccaggaagatacttaacagggaagtgagagggccgcggcaaagccgtttttccataggctccgcccccctgacaagcatcacgaaatctgacgctcaaatcagtggtggcgaaacccgacaggactataaagataccaggcgtttccccctggcggctccctcgtgcgctctcctgttcctgcctttcggtttaccggtgtcattccgctgttatggccgcgtttgtctcattccacgcctgacactcagttccgggtaggcagttcgctccaagctggactgtatgcacgaaccccccgttcagtccgaccgctgcgccttatccggtaactatcgtcttgagtccaacccggaaagacatgcaaaagcaccactggcagcagccactggtaattgatttagaggagttagtcttgaagtcatgcgccggttaaggctaaactgaaaggacaagttttggtgactgcgctcctccaagccagttacctcggttcaaagagttggtagctcagagaaccttcgaaaaaccgccctgcaaggcggttttttcgttttcagagcaagagattacgcgcagaccaaaacgatctcaagaagatcatcttattaatcagataaaatatttctagatttcagtgcaatttatctcttcaaatgtagcacctgaagtcagccccatacgatataagttgtaattctcatgttagtcatgccccgcgcccaccggaaggagctgactgggttgaaggctctcaagggcatcggtcgagatcccggtgcctaatgagtgagctaacttacattaattgcgttgcgca

SEQ ID NO: 961 - DNA, 4198 bp, Synthetic construct
  source 1..4198: mol_type = other DNA
acacgatataaaaccatctcattgcttgctgggttaactgagttgctgaatttttttctagaatttcgcaaaatttaataggtaaaccttgtttttttaaatttacgatgatataaaaataatgccctaaacaaaggtttaggggtattgttaccgtcggcgtccccagggtattttacgttagcatcaggtggactaatatgaatctttactcccaagcgaaaacgggtgcgtggactagcgaggagcaaacgaaaattcttggcctgctacatttgcggcgaggttcacaatttgtatttaggtactgattgtggatgagaaggttggagaaagaccacttggttaagccggaggatgtgtcctagaattgtcgctattctgtcatcctccggttttgctaatttcattcagggaatataatggactacaaagaccatgacggtgattataaagatcatgacatcgattacaaggatgacgatgacaagggaggaagcggatcgatgaataatgatgattacccatggttcagaaaacgtggttatttgcatttcgatgaacctgtttcattaaaaaaagcggttaaatatgtttcctctccagaaaaaataataaaacattcttttctgccatttttaagctttgaagtaaaatcgtttaaaatcaaaaaagacaaatcaacaaaacaattaagtaaaactgaaaaattaagacctattgcctattcctcacatttggatagtcatatttatgcattttacgcagaatatcttactggacattatgaattattgatccaagaaaacaatttacacgagaacatccttgccttcagatctttaaataaaagcaatatagaatttgccaagagagcatttgatacaattactgaaatgggtgagtgtagcgctgttgcattagatctttctggtttttttgacaatttagatcatcaaattttgaaacaccagtggtgcaaagttattgggactgaagcgttgccgcaagaccattttgccatatacaaaagtataacaagatattctaaagttgataaaaatagagcgtatgagattttaggtatatcaaagaataaccccaagtataatagacgcaagatctgcacccctgttgattttagaaataagattagaaaaaatggtcttattatagttaataattcccaaaaaggtataccccaaggctcgccaattagtgctctactttcaaatatatatatgcttgactttgatattgaaatgagagattacgcgcaggaacgtggtggccattattatcgctattgtgatgatatgctattcattgtaccaactaagtataataaaactctagcaggtgatgtagcccagcggattaagcatcttaaggtagaactcaatactaagaaaactgagattcgagattttatatacaaagacagtaccttagtggcaaatatgcctttacagtatcttgggtttatttttgatgggagtaatatattattacgttcatcttctctcgcaagatattcggaacgaatgaaaagaggtgtccgcttagcaaaagctacaatggacagcaagaataggattagagaaaataaaggtgaagctttaaaagctttatttaagaaaaaattatatgccagatattcacatattggaagaaggaattttttgacttatggttatcgcgccgcgaagatcatgaattcgaaagctataaaaagacagttaaaaccattgcagaaaagattggaaaatgaaatactaaaataaatatttgctggcccgaatcatacagggccacaatacagttgaaaacaagctataataaacaacatctaatttttatataccgcaataactagcataaccccttggggcctctaaacgggtcttgaggggttttttgctgaaacctcaggcatttgagaagcacacggtcacactgcttccggtagtcaataaaccggtaaaccagcaatagacataagcggctatttaacgaccctgccctgaaccgacgaccgggtcgaatttgctttcgaatttctgccattcatccgcttattatcacttattcaggcgtagcaccaggcgtttaagggcaccaataactgccttaaaaaaattacgccccgccctgccactcatcgcaatactgttgtaattcatttaacattctgccgacatggaagccatcacagacggcatgatgaacctgaatcgccagcggcatcagcaccttgtcgccttgcgtataatatttgcccatagtgaaaacgggggcgaagaagttgtccatattggccacgtttaaatcaaaactggtgaaactcacccagggattggctgagacgaaaaacatattctcaataaaccctttagggaaataggccaggttttcaccgtaacacgccacatcttgcgaatatatgtgtagaaactgccggaaatcgtcgtggtattcactccagagcgatgaaaacgtttcagtttgctcatggaaaacggtgtaacaagggtgaacactatcccatatcaccagctcaccgtctttcatcgccatacggaactctggatgagcattcatcaggcgggcaagaatgtgaataaaggccggataaaacttgtgcttatttttctttacggtctttaaaaaggccgtaatatccagctgaacggtctggttataggtacattgagcaactgactgaaatgcctcaaaatgttctttacgatgccattgggatatatcaacggtggtatatccagtgatttttttctccattttagcttccttagctcctgaaaatctcgataactcaaaaaatacgcccggtagtgatcttatttcattatggtgaaagttggaacctcttacgtgccgatcaacgtctcattttcgccaaaagttggcccagggcttcccggtatcaacagggacaccaggatttatttattctgcgaagtgatcttccgtcacaggtatttattcggcgcaaagtgcgtcgggtgatgctgccaacttactgatttagtgtatgatggtgtttttgaggtgctccagtggcttctgtttctatcagctgtccctcctgttcagctactgacggggtggtgcgtaacggcaaaagcaccgccggacatcagcgctagcggagtgtatactggcttactatgttggcactgatgagggtgtcagtgaagtgcttcatgtggcaggagaaaaaaggctgcaccggtgcgtcagcagaatatgtgatacaggatatattccgcttcctcgctcactgactcgctacgctcggtcgttcgactgcggcgagcggaaatggcttacgaacggggcggagatttcctggaagatgccaggaagatacttaacagggaagtgagagggccgcggcaaagccgtttttccataggctccgcccccctgacaagcatcacgaaatctgacgctcaaatcagtggtggcgaaacccgacaggactataaagataccaggcgtttccccctggcggctccctcgtgcgctctcctgttcctgcctttcggtttaccggtgtcattccgctgttatggccgcgtttgtctcattccacgcctgacactcagttccgggtaggcagttcgctccaagctggactgtatgcacgaaccccccgttcagtccgaccgctgcgccttatccggtaactatcgtcttgagtccaacccggaaagacatgcaaaagcaccactggcagcagccactggtaattgatttagaggagttagtcttgaagtcatgcgccggttaaggctaaactgaaaggacaagttttggtgactgcgctcctccaagccagttacctcggttcaaagagttggtagctcagagaaccttcgaaaaaccgccctgcaaggcggttttttcgttttcagagcaagagattacgcgcagaccaaaacgatctcaagaagatcatcttattaatcagataaaatatttctagatttcagtgcaatttatctcttcaaatgtagcacctgaagtcagccccatacgatataagttgtaattctcatgttagtcatgccccgcgcccaccggaaggagctgactgggttgaaggctctcaagggcatcggtcgagatcccggtgcctaatgagtgagctaacttacattaattgcgttgcgca

SEQ ID NO: 962 - DNA, 4198 bp, Synthetic construct
  source 1..4198: mol_type = other DNA
acacgatataaaaccatctcattgcttgctgggttaactgagttgctgaatttttttctagaatttcgcaaaatttaataggtaaaccttgtttttttaaatttacgatgatataaaaataatgccctaaacaaaggtttaggggtattgtacacattatgcagcctggttggatcaatacccaagagaaccgcgaacctaccgctgattatgggctggatgatattcataattgactccacgctactgattacattatacagcatatctaacatttgcggcgaggttcacaatttgtatttaggtactgattgtggatgagaaggttggagaaagaccacttggttaagccggaggatgtgtcctagaattgtcgctattctgtcatcctccggttttgctaatttcattcagggaatataatggactacaaagaccatgacggtgattataaagatcatgacatcgattacaaggatgacgatgacaagggaggaagcggatcgatgaataatgatgattacccatggttcagaaaacgtggttatttgcatttcgatgaacctgtttcattaaaaaaagcggttaaatatgtttcctctccagaaaaaataataaaacattcttttctgccatttttaagctttgaagtaaaatcgtttaaaatcaaaaaagacaaatcaacaaaacaattaagtaaaactgaaaaattaagacctattgcctattcctcacatttggatagtcatatttatgcattttacgcagaatatcttactggacattatgaattattgatccaagaaaacaatttacacgagaacatccttgccttcagatctttaaataaaagcaatatagaatttgccaagagagcatttgatacaattactgaaatgggtgagtgtagcgctgttgcattagatctttctggtttttttgacaatttagatcatcaaattttgaaacaccagtggtgcaaagttattgggactgaagcgttgccgcaagaccattttgccatatacaaaagtataacaagatattctaaagttgataaaaatagagcgtatgagattttaggtatatcaaagaataaccccaagtataatagacgcaagatctgcacccctgttgattttagaaataagattagaaaaaatggtcttattatagttaataattcccaaaaaggtataccccaaggctcgccaattagtgctctactttcaaatatatatatgcttgactttgatattgaaatgagagattacgcgcaggaacgtggtggccattattatcgctattgtgatgatatgctattcattgtaccaactaagtataataaaactctagcaggtgatgtagcccagcggattaagcatcttaaggtagaactcaatactaagaaaactgagattcgagattttatatacaaagacagtaccttagtggcaaatatgcctttacagtatcttgggtttatttttgatgggagtaatatattattacgttcatcttctctcgcaagatattcggaacgaatgaaaagaggtgtccgcttagcaaaagctacaatggacagcaagaataggattagagaaaataaaggtgaagctttaaaagctttatttaagaaaaaattatatgccagatattcacatattggaagaaggaattttttgacttatggttatcgcgccgcgaagatcatgaattcgaaagctataaaaagacagttaaaaccattgcagaaaagattggaaaatgaaatactaaaataaatatttgctggcccgaatcatacagggccacaatacagttgaaaacaagctataataaacaacatctaatttttatataccgcaataactagcataaccccttggggcctctaaacgggtcttgaggggttttttgctgaaacctcaggcatttgagaagcacacggtcacactgcttccggtagtcaataaaccggtaaaccagcaatagacataagcggctatttaacgaccctgccctgaaccgacgaccgggtcgaatttgctttcgaatttctgccattcatccgcttattatcacttattcaggcgtagcaccaggcgtttaagggcaccaataactgccttaaaaaaattacgccccgccctgccactcatcgcaatactgttgtaattcatttaacattctgccgacatggaagccatcacagacggcatgatgaacctgaatcgccagcggcatcagcaccttgtcgccttgcgtataatatttgcccatagtgaaaacgggggcgaagaagttgtccatattggccacgtttaaatcaaaactggtgaaactcacccagggattggctgagacgaaaaacatattctcaataaaccctttagggaaataggccaggttttcaccgtaacacgccacatcttgcgaatatatgtgtagaaactgccggaaatcgtcgtggtattcactccagagcgatgaaaacgtttcagtttgctcatggaaaacggtgtaacaagggtgaacactatcccatatcaccagctcaccgtctttcatcgccatacggaactctggatgagcattcatcaggcgggcaagaatgtgaataaaggccggataaaacttgtgcttatttttctttacggtctttaaaaaggccgtaatatccagctgaacggtctggttataggtacattgagcaactgactgaaatgcctcaaaatgttctttacgatgccattgggatatatcaacggtggtatatccagtgatttttttctccattttagcttccttagctcctgaaaatctcgataactcaaaaaatacgcccggtagtgatcttatttcattatggtgaaagttggaacctcttacgtgccgatcaacgtctcattttcgccaaaagttggcccagggcttcccggtatcaacagggacaccaggatttatttattctgcgaagtgatcttccgtcacaggtatttattcggcgcaaagtgcgtcgggtgatgctgccaacttactgatttagtgtatgatggtgtttttgaggtgctccagtggcttctgtttctatcagctgtccctcctgttcagctactgacggggtggtgcgtaacggcaaaagcaccgccggacatcagcgctagcggagtgtatactggcttactatgttggcactgatgagggtgtcagtgaagtgcttcatgtggcaggagaaaaaaggctgcaccggtgcgtcagcagaatatgtgatacaggatatattccgcttcctcgctcactgactcgctacgctcggtcgttcgactgcggcgagcggaaatggcttacgaacggggcggagatttcctggaagatgccaggaagatacttaacagggaagtgagagggccgcggcaaagccgtttttccataggctccgcccccctgacaagcatcacgaaatctgacgctcaaatcagtggtggcgaaacccgacaggactataaagataccaggcgtttccccctggcggctccctcgtgcgctctcctgttcctgcctttcggtttaccggtgtcattccgctgttatggccgcgtttgtctcattccacgcctgacactcagttccgggtaggcagttcgctccaagctggactgtatgcacgaaccccccgttcagtccgaccgctgcgccttatccggtaactatcgtcttgagtccaacccggaaagacatgcaaaagcaccactggcagcagccactggtaattgatttagaggagttagtcttgaagtcatgcgccggttaaggctaaactgaaaggacaagttttggtgactgcgctcctccaagccagttacctcggttcaaagagttggtagctcagagaaccttcgaaaaaccgccctgcaaggcggttttttcgttttcagagcaagagattacgcgcagaccaaaacgatctcaagaagatcatcttattaatcagataaaatatttctagatttcagtgcaatttatctcttcaaatgtagcacctgaagtcagccccatacgatataagttgtaattctcatgttagtcatgccccgcgcccaccggaaggagctgactgggttgaaggctctcaagggcatcggtcgagatcccggtgcctaatgagtgagctaacttacattaattgcgttgcgca

SEQ ID NO: 963 - DNA, 4198 bp, Synthetic construct
  source 1..4198: mol_type = other DNA
acacgatataaaaccatctcattgcttgctgggttaactgagttgctgaatttttttctagaatttcgcaaaatttaataggtaaaccttgtttttttaaatttacgatgatataaaaataatgccctaaacaaaggtttaggggtattgtacaggttgtcaagcctcccacaggtcttggtgaaaccaatcactgtgacgacggtaagcaacactagcattcttttgaattagctacagacgctactgattacattatacagcatatctaacatttgcggcgaggttcacaatttgtatttaggtactgattgtggatgagaaggttggagaaagaccacttggttaagccggaggatgtgtcctagaattgtcgctattctgtcatcctccggttttgctaatttcattcagggaatataatggactacaaagaccatgacggtgattataaagatcatgacatcgattacaaggatgacgatgacaagggaggaagcggatcgatgaataatgatgattacccatggttcagaaaacgtggttatttgcatttcgatgaacctgtttcattaaaaaaagcggttaaatatgtttcctctccagaaaaaataataaaacattcttttctgccatttttaagctttgaagtaaaatcgtttaaaatcaaaaaagacaaatcaacaaaacaattaagtaaaactgaaaaattaagacctattgcctattcctcacatttggatagtcatatttatgcattttacgcagaatatcttactggacattatgaattattgatccaagaaaacaatttacacgagaacatccttgccttcagatctttaaataaaagcaatatagaatttgccaagagagcatttgatacaattactgaaatgggtgagtgtagcgctgttgcattagatctttctggtttttttgacaatttagatcatcaaattttgaaacaccagtggtgcaaagttattgggactgaagcgttgccgcaagaccattttgccatatacaaaagtataacaagatattctaaagttgataaaaatagagcgtatgagattttaggtatatcaaagaataaccccaagtataatagacgcaagatctgcacccctgttgattttagaaataagattagaaaaaatggtcttattatagttaataattcccaaaaaggtataccccaaggctcgccaattagtgctctactttcaaatatatatatgcttgactttgatattgaaatgagagattacgcgcaggaacgtggtggccattattatcgctattgtgatgatatgctattcattgtaccaactaagtataataaaactctagcaggtgatgtagcccagcggattaagcatcttaaggtagaactcaatactaagaaaactgagattcgagattttatatacaaagacagtaccttagtggcaaatatgcctttacagtatcttgggtttatttttgatgggagtaatatattattacgttcatcttctctcgcaagatattcggaacgaatgaaaagaggtgtccgcttagcaaaagctacaatggacagcaagaataggattagagaaaataaaggtgaagctttaaaagctttatttaagaaaaaattatatgccagatattcacatattggaagaaggaattttttgacttatggttatcgcgccgcgaagatcatgaattcgaaagctataaaaagacagttaaaaccattgcagaaaagattggaaaatgaaatactaaaataaatatttgctggcccgaatcatacagggccacaatacagttgaaaacaagctataataaacaacatctaatttttatataccgcaataactagcataaccccttggggcctctaaacgggtcttgaggggttttttgctgaaacctcaggcatttgagaagcacacggtcacactgcttccggtagtcaataaaccggtaaaccagcaatagacataagcggctatttaacgaccctgccctgaaccgacgaccgggtcgaatttgctttcgaatttctgccattcatccgcttattatcacttattcaggcgtagcaccaggcgtttaagggcaccaataactgccttaaaaaaattacgccccgccctgccactcatcgcaatactgttgtaattcatttaacattctgccgacatggaagccatcacagacggcatgatgaacctgaatcgccagcggcatcagcaccttgtcgccttgcgtataatatttgcccatagtgaaaacgggggcgaagaagttgtccatattggccacgtttaaatcaaaactggtgaaactcacccagggattggctgagacgaaaaacatattctcaataaaccctttagggaaataggccaggttttcaccgtaacacgccacatcttgcgaatatatgtgtagaaactgccggaaatcgtcgtggtattcactccagagcgatgaaaacgtttcagtttgctcatggaaaacggtgtaacaagggtgaacactatcccatatcaccagctcaccgtctttcatcgccatacggaactctggatgagcattcatcaggcgggcaagaatgtgaataaaggccggataaaacttgtgcttatttttctttacggtctttaaaaaggccgtaatatccagctgaacggtctggttataggtacattgagcaactgactgaaatgcctcaaaatgttctttacgatgccattgggatatatcaacggtggtatatccagtgatttttttctccattttagcttccttagctcctgaaaatctcgataactcaaaaaatacgcccggtagtgatcttatttcattatggtgaaagttggaacctcttacgtgccgatcaacgtctcattttcgccaaaagttggcccagggcttcccggtatcaacagggacaccaggatttatttattctgcgaagtgatcttccgtcacaggtatttattcggcgcaaagtgcgtcgggtgatgctgccaacttactgatttagtgtatgatggtgtttttgaggtgctccagtggcttctgtttctatcagctgtccctcctgttcagctactgacggggtggtgcgtaacggcaaaagcaccgccggacatcagcgctagcggagtgtatactggcttactatgttggcactgatgagggtgtcagtgaagtgcttcatgtggcaggagaaaaaaggctgcaccggtgcgtcagcagaatatgtgatacaggatatattccgcttcctcgctcactgactcgctacgctcggtcgttcgactgcggcgagcggaaatggcttacgaacggggcggagatttcctggaagatgccaggaagatacttaacagggaagtgagagggccgcggcaaagccgtttttccataggctccgcccccctgacaagcatcacgaaatctgacgctcaaatcagtggtggcgaaacccgacaggactataaagataccaggcgtttccccctggcggctccctcgtgcgctctcctgttcctgcctttcggtttaccggtgtcattccgctgttatggccgcgtttgtctcattccacgcctgacactcagttccgggtaggcagttcgctccaagctggactgtatgcacgaaccccccgttcagtccgaccgctgcgccttatccggtaactatcgtcttgagtccaacccggaaagacatgcaaaagcaccactggcagcagccactggtaattgatttagaggagttagtcttgaagtcatgcgccggttaaggctaaactgaaaggacaagttttggtgactgcgctcctccaagccagttacctcggttcaaagagttggtagctcagagaaccttcgaaaaaccgccctgcaaggcggttttttcgttttcagagcaagagattacgcgcagaccaaaacgatctcaagaagatcatcttattaatcagataaaatatttctagatttcagtgcaatttatctcttcaaatgtagcacctgaagtcagccccatacgatataagttgtaattctcatgttagtcatgccccgcgcccaccggaaggagctgactgggttgaaggctctcaagggcatcggtcgagatcccggtgcctaatgagtgagctaacttacattaattgcgttgcgca

SEQ ID NO: 964 - DNA, 4198 bp, Synthetic construct
  source 1..4198: mol_type = other DNA
acacgatataaaaccatctcattgcttgctgggttaactgagttgctgaatttttttctagaatttcgcaaaatttaataggtaaaccttgtttttttaaatttacgatgatataaaaataatgccctaaacaaaggtttaggggtattgtacaccaacagttcggagggtgtccagaaccactttggttagtgacactgctgccattcgttgtgaacctactataagtattaactgaggtgcgatgactaatgtaatatgtcgtatagatacatttgcggcgaggttcacaatttgtatttaggtactgattgtggatgagaaggttggagaaagaccacttggttaagccggaggatgtgtcctagaattgtcgctattctgtcatcctccggttttgctaatttcattcagggaatataatggactacaaagaccatgacggtgattataaagatcatgacatcgattacaaggatgacgatgacaagggaggaagcggatcgatgaataatgatgattacccatggttcagaaaacgtggttatttgcatttcgatgaacctgtttcattaaaaaaagcggttaaatatgtttcctctccagaaaaaataataaaacattcttttctgccatttttaagctttgaagtaaaatcgtttaaaatcaaaaaagacaaatcaacaaaacaattaagtaaaactgaaaaattaagacctattgcctattcctcacatttggatagtcatatttatgcattttacgcagaatatcttactggacattatgaattattgatccaagaaaacaatttacacgagaacatccttgccttcagatctttaaataaaagcaatatagaatttgccaagagagcatttgatacaattactgaaatgggtgagtgtagcgctgttgcattagatctttctggtttttttgacaatttagatcatcaaattttgaaacaccagtggtgcaaagttattgggactgaagcgttgccgcaagaccattttgccatatacaaaagtataacaagatattctaaagttgataaaaatagagcgtatgagattttaggtatatcaaagaataaccccaagtataatagacgcaagatctgcacccctgttgattttagaaataagattagaaaaaatggtcttattatagttaataattcccaaaaaggtataccccaaggctcgccaattagtgctctactttcaaatatatatatgcttgactttgatattgaaatgagagattacgcgcaggaacgtggtggccattattatcgctattgtgatgatatgctattcattgtaccaactaagtataataaaactctagcaggtgatgtagcccagcggattaagcatcttaaggtagaactcaatactaagaaaactgagattcgagattttatatacaaagacagtaccttagtggcaaatatgcctttacagtatcttgggtttatttttgatgggagtaatatattattacgttcatcttctctcgcaagatattcggaacgaatgaaaagaggtgtccgcttagcaaaagctacaatggacagcaagaataggattagagaaaataaaggtgaagctttaaaagctttatttaagaaaaaattatatgccagatattcacatattggaagaaggaattttttgacttatggttatcgcgccgcgaagatcatgaattcgaaagctataaaaagacagttaaaaccattgcagaaaagattggaaaatgaaatactaaaataaatatttgctggcccgaatcatacagggccacaatacagttgaaaacaagctataataaacaacatctaatttttatataccgcaataactagcataaccccttggggcctctaaacgggtcttgaggggttttttgctgaaacctcaggcatttgagaagcacacggtcacactgcttccggtagtcaataaaccggtaaaccagcaatagacataagcggctatttaacgaccctgccctgaaccgacgaccgggtcgaatttgctttcgaatttctgccattcatccgcttattatcacttattcaggcgtagcaccaggcgtttaagggcaccaataactgccttaaaaaaattacgccccgccctgccactcatcgcaatactgttgtaattcatttaacattctgccgacatggaagccatcacagacggcatgatgaacctgaatcgccagcggcatcagcaccttgtcgccttgcgtataatatttgcccatagtgaaaacgggggcgaagaagttgtccatattggccacgtttaaatcaaaactggtgaaactcacccagggattggctgagacgaaaaacatattctcaataaaccctttagggaaataggccaggttttcaccgtaacacgccacatcttgcgaatatatgtgtagaaactgccggaaatcgtcgtggtattcactccagagcgatgaaaacgtttcagtttgctcatggaaaacggtgtaacaagggtgaacactatcccatatcaccagctcaccgtctttcatcgccatacggaactctggatgagcattcatcaggcgggcaagaatgtgaataaaggccggataaaacttgtgcttatttttctttacggtctttaaaaaggccgtaatatccagctgaacggtctggttataggtacattgagcaactgactgaaatgcctcaaaatgttctttacgatgccattgggatatatcaacggtggtatatccagtgatttttttctccattttagcttccttagctcctgaaaatctcgataactcaaaaaatacgcccggtagtgatcttatttcattatggtgaaagttggaacctcttacgtgccgatcaacgtctcattttcgccaaaagttggcccagggcttcccggtatcaacagggacaccaggatttatttattctgcgaagtgatcttccgtcacaggtatttattcggcgcaaagtgcgtcgggtgatgctgccaacttactgatttagtgtatgatggtgtttttgaggtgctccagtggcttctgtttctatcagctgtccctcctgttcagctactgacggggtggtgcgtaacggcaaaagcaccgccggacatcagcgctagcggagtgtatactggcttactatgttggcactgatgagggtgtcagtgaagtgcttcatgtggcaggagaaaaaaggctgcaccggtgcgtcagcagaatatgtgatacaggatatattccgcttcctcgctcactgactcgctacgctcggtcgttcgactgcggcgagcggaaatggcttacgaacggggcggagatttcctggaagatgccaggaagatacttaacagggaagtgagagggccgcggcaaagccgtttttccataggctccgcccccctgacaagcatcacgaaatctgacgctcaaatcagtggtggcgaaacccgacaggactataaagataccaggcgtttccccctggcggctccctcgtgcgctctcctgttcctgcctttcggtttaccggtgtcattccgctgttatggccgcgtttgtctcattccacgcctgacactcagttccgggtaggcagttcgctccaagctggactgtatgcacgaaccccccgttcagtccgaccgctgcgccttatccggtaactatcgtcttgagtccaacccggaaagacatgcaaaagcaccactggcagcagccactggtaattgatttagaggagttagtcttgaagtcatgcgccggttaaggctaaactgaaaggacaagttttggtgactgcgctcctccaagccagttacctcggttcaaagagttggtagctcagagaaccttcgaaaaaccgccctgcaaggcggttttttcgttttcagagcaagagattacgcgcagaccaaaacgatctcaagaagatcatcttattaatcagataaaatatttctagatttcagtgcaatttatctcttcaaatgtagcacctgaagtcagccccatacgatataagttgtaattctcatgttagtcatgccccgcgcccaccggaaggagctgactgggttgaaggctctcaagggcatcggtcgagatcccggtgcctaatgagtgagctaacttacattaattgcgttgcgca

SEQ ID NO: 965 - DNA, 4198 bp, Synthetic construct
  source 1..4198: mol_type = other DNA
acacgatataaaaccatctcattgcttgctgggttaactgagttgctgaatttttttctagaatttcgcaaaatttaataggtaaaccttgtttttttaaatttacgatgatataaaaataatgccctaaacaaaggtttaggggtattgtacaccaacagttcggagggtgtccagaaccactttggttagtgacactgctgccattcgttgtgaacctactataagtattaactgaggtgcgatgactaatgtaatatgtcgtatagtaacatttgcggcgaggttcacaatttgtatttaggtactgattgtggatgagaaggttggagaaagaccacttggttaagccggaggatgtgtcctagaattgtcgctattctgtcatcctccggttttgctaatttcattcagggaatataatggactacaaagaccatgacggtgattataaagatcatgacatcgattacaaggatgacgatgacaagggaggaagcggatcgatgaataatgatgattacccatggttcagaaaacgtggttatttgcatttcgatgaacctgtttcattaaaaaaagcggttaaatatgtttcctctccagaaaaaataataaaacattcttttctgccatttttaagctttgaagtaaaatcgtttaaaatcaaaaaagacaaatcaacaaaacaattaagtaaaactgaaaaattaagacctattgcctattcctcacatttggatagtcatatttatgcattttacgcagaatatcttactggacattatgaattattgatccaagaaaacaatttacacgagaacatccttgccttcagatctttaaataaaagcaatatagaatttgccaagagagcatttgatacaattactgaaatgggtgagtgtagcgctgttgcattagatctttctggtttttttgacaatttagatcatcaaattttgaaacaccagtggtgcaaagttattgggactgaagcgttgccgcaagaccattttgccatatacaaaagtataacaagatattctaaagttgataaaaatagagcgtatgagattttaggtatatcaaagaataaccccaagtataatagacgcaagatctgcacccctgttgattttagaaataagattagaaaaaatggtcttattatagttaataattcccaaaaaggtataccccaaggctcgccaattagtgctctactttcaaatatatatatgcttgactttgatattgaaatgagagattacgcgcaggaacgtggtggccattattatcgctattgtgatgatatgctattcattgtaccaactaagtataataaaactctagcaggtgatgtagcccagcggattaagcatcttaaggtagaactcaatactaagaaaactgagattcgagattttatatacaaagacagtaccttagtggcaaatatgcctttacagtatcttgggtttatttttgatgggagtaatatattattacgttcatcttctctcgcaagatattcggaacgaatgaaaagaggtgtccgcttagcaaaagctacaatggacagcaagaataggattagagaaaataaaggtgaagctttaaaagctttatttaagaaaaaattatatgccagatattcacatattggaagaaggaattttttgacttatggttatcgcgccgcgaagatcatgaattcgaaagctataaaaagacagttaaaaccattgcagaaaagattggaaaatgaaatactaaaataaatatttgctggcccgaatcatacagggccacaatacagttgaaaacaagctataataaacaacatctaatttttatataccgcaataactagcataaccccttggggcctctaaacgggtcttgaggggttttttgctgaaacctcaggcatttgagaagcacacggtcacactgcttccggtagtcaataaaccggtaaaccagcaatagacataagcggctatttaacgaccctgccctgaaccgacgaccgggtcgaatttgctttcgaatttctgccattcatccgcttattatcacttattcaggcgtagcaccaggcgtttaagggcaccaataactgccttaaaaaaattacgccccgccctgccactcatcgcaatactgttgtaattcatttaacattctgccgacatggaagccatcacagacggcatgatgaacctgaatcgccagcggcatcagcaccttgtcgccttgcgtataatatttgcccatagtgaaaacgggggcgaagaagttgtccatattggccacgtttaaatcaaaactggtgaaactcacccagggattggctgagacgaaaaacatattctcaataaaccctttagggaaataggccaggttttcaccgtaacacgccacatcttgcgaatatatgtgtagaaactgccggaaatcgtcgtggtattcactccagagcgatgaaaacgtttcagtttgctcatggaaaacggtgtaacaagggtgaacactatcccatatcaccagctcaccgtctttcatcgccatacggaactctggatgagcattcatcaggcgggcaagaatgtgaataaaggccggataaaacttgtgcttatttttctttacggtctttaaaaaggccgtaatatccagctgaacggtctggttataggtacattgagcaactgactgaaatgcctcaaaatgttctttacgatgccattgggatatatcaacggtggtatatccagtgatttttttctccattttagcttccttagctcctgaaaatctcgataactcaaaaaatacgcccggtagtgatcttatttcattatggtgaaagttggaacctcttacgtgccgatcaacgtctcattttcgccaaaagttggcccagggcttcccggtatcaacagggacaccaggatttatttattctgcgaagtgatcttccgtcacaggtatttattcggcgcaaagtgcgtcgggtgatgctgccaacttactgatttagtgtatgatggtgtttttgaggtgctccagtggcttctgtttctatcagctgtccctcctgttcagctactgacggggtggtgcgtaacggcaaaagcaccgccggacatcagcgctagcggagtgtatactggcttactatgttggcactgatgagggtgtcagtgaagtgcttcatgtggcaggagaaaaaaggctgcaccggtgcgtcagcagaatatgtgatacaggatatattccgcttcctcgctcactgactcgctacgctcggtcgttcgactgcggcgagcggaaatggcttacgaacggggcggagatttcctggaagatgccaggaagatacttaacagggaagtgagagggccgcggcaaagccgtttttccataggctccgcccccctgacaagcatcacgaaatctgacgctcaaatcagtggtggcgaaacccgacaggactataaagataccaggcgtttccccctggcggctccctcgtgcgctctcctgttcctgcctttcggtttaccggtgtcattccgctgttatggccgcgtttgtctcattccacgcctgacactcagttccgggtaggcagttcgctccaagctggactgtatgcacgaaccccccgttcagtccgaccgctgcgccttatccggtaactatcgtcttgagtccaacccggaaagacatgcaaaagcaccactggcagcagccactggtaattgatttagaggagttagtcttgaagtcatgcgccggttaaggctaaactgaaaggacaagttttggtgactgcgctcctccaagccagttacctcggttcaaagagttggtagctcagagaaccttcgaaaaaccgccctgcaaggcggttttttcgttttcagagcaagagattacgcgcagaccaaaacgatctcaagaagatcatcttattaatcagataaaatatttctagatttcagtgcaatttatctcttcaaatgtagcacctgaagtcagccccatacgatataagttgtaattctcatgttagtcatgccccgcgcccaccggaaggagctgactgggttgaaggctctcaagggcatcggtcgagatcccggtgcctaatgagtgagctaacttacattaattgcgttgcgca

SEQ ID NO: 966 - DNA, 4114 bp, Synthetic construct
  source 1..4114: mol_type = other DNA
acacgatataaaaccatctcattgcttgctgggttaactgagttgctgaatttttttctagaatttcgcaaaatttaataggtaaaccttgtttttttaaatttacgatgatataaaaataatgccctaaacaaaggtttaggggtattgtacaggttgtcaagtccaatcggcacgccaccaaggcaagctgagcagatagacagcatgaactggaacagggtcttcatagatacctccacggttatagttatagcataatccatttctaacatttgcggcgaggttcacaatttgtatttaggtactgattgtggatgagaaggttggagaaagaccacttggttaagccggaggatgtgtcctagaattgtcgctattctgtcatcctccggttttgctaatttcattcagggaatataatgaataatgatgattacccatggttcagaaaacgtggttatttgcatttcgatgaacctgtttcattaaaaaaagcggttaaatatgtttcctctccagaaaaaataataaaacattcttttctgccatttttaagctttgaagtaaaatcgtttaaaatcaaaaaagacaaatcaacaaaacaattaagtaaaactgaaaaattaagacctattgcctattcctcacatttggatagtcatatttatgcattttacgcagaatatcttactggacattatgaattattgatccaagaaaacaatttacacgagaacatccttgccttcagatctttaaataaaagcaatatagaatttgccaagagagcatttgatacaattactgaaatgggtgagtgtagcgctgttgcattagatctttctggtttttttgacaatttagatcatcaaattttgaaacaccagtggtgcaaagttattgggactgaagcgttgccgcaagaccattttgccatatacaaaagtataacaagatattctaaagttgataaaaatagagcgtatgagattttaggtatatcaaagaataaccccaagtataatagacgcaagatctgcacccctgttgattttagaaataagattagaaaaaatggtcttattatagttaataattcccaaaaaggtataccccaaggctcgccaattagtgctctactttcaaatatatatatgcttgactttgatattgaaatgagagattacgcgcaggaacgtggtggccattattatcgctattgtgatgatatgctattcattgtaccaactaagtataataaaactctagcaggtgatgtagcccagcggattaagcatcttaaggtagaactcaatactaagaaaactgagattcgagattttatatacaaagacagtaccttagtggcaaatatgcctttacagtatcttgggtttatttttgatgggagtaatatattattacgttcatcttctctcgcaagatattcggaacgaatgaaaagaggtgtccgcttagcaaaagctacaatggacagcaagaataggattagagaaaataaaggtgaagctttaaaagctttatttaagaaaaaattatatgccagatattcacatattggaagaaggaattttttgacttatggttatcgcgccgcgaagatcatgaattcgaaagctataaaaagacagttaaaaccattgcagaaaagattggaaaatgaaatactaaaataaatatttgctggcccgaatcatacagggccacaatacagttgaaaacaagctataataaacaacatctaatttttatataccgcaataactagcataaccccttggggcctctaaacgggtcttgaggggttttttgctgaaacctcaggcatttgagaagcacacggtcacactgcttccggtagtcaataaaccggtaaaccagcaatagacataagcggctatttaacgaccctgccctgaaccgacgaccgggtcgaatttgctttcgaatttctgccattcatccgcttattatcacttattcaggcgtagcaccaggcgtttaagggcaccaataactgccttaaaaaaattacgccccgccctgccactcatcgcaatactgttgtaattcatttaacattctgccgacatggaagccatcacagacggcatgatgaacctgaatcgccagcggcatcagcaccttgtcgccttgcgtataatatttgcccatagtgaaaacgggggcgaagaagttgtccatattggccacgtttaaatcaaaactggtgaaactcacccagggattggctgagacgaaaaacatattctcaataaaccctttagggaaataggccaggttttcaccgtaacacgccacatcttgcgaatatatgtgtagaaactgccggaaatcgtcgtggtattcactccagagcgatgaaaacgtttcagtttgctcatggaaaacggtgtaacaagggtgaacactatcccatatcaccagctcaccgtctttcatcgccatacggaactctggatgagcattcatcaggcgggcaagaatgtgaataaaggccggataaaacttgtgcttatttttctttacggtctttaaaaaggccgtaatatccagctgaacggtctggttataggtacattgagcaactgactgaaatgcctcaaaatgttctttacgatgccattgggatatatcaacggtggtatatccagtgatttttttctccattttagcttccttagctcctgaaaatctcgataactcaaaaaatacgcccggtagtgatcttatttcattatggtgaaagttggaacctcttacgtgccgatcaacgtctcattttcgccaaaagttggcccagggcttcccggtatcaacagggacaccaggatttatttattctgcgaagtgatcttccgtcacaggtatttattcggcgcaaagtgcgtcgggtgatgctgccaacttactgatttagtgtatgatggtgtttttgaggtgctccagtggcttctgtttctatcagctgtccctcctgttcagctactgacggggtggtgcgtaacggcaaaagcaccgccggacatcagcgctagcggagtgtatactggcttactatgttggcactgatgagggtgtcagtgaagtgcttcatgtggcaggagaaaaaaggctgcaccggtgcgtcagcagaatatgtgatacaggatatattccgcttcctcgctcactgactcgctacgctcggtcgttcgactgcggcgagcggaaatggcttacgaacggggcggagatttcctggaagatgccaggaagatacttaacagggaagtgagagggccgcggcaaagccgtttttccataggctccgcccccctgacaagcatcacgaaatctgacgctcaaatcagtggtggcgaaacccgacaggactataaagataccaggcgtttccccctggcggctccctcgtgcgctctcctgttcctgcctttcggtttaccggtgtcattccgctgttatggccgcgtttgtctcattccacgcctgacactcagttccgggtaggcagttcgctccaagctggactgtatgcacgaaccccccgttcagtccgaccgctgcgccttatccggtaactatcgtcttgagtccaacccggaaagacatgcaaaagcaccactggcagcagccactggtaattgatttagaggagttagtcttgaagtcatgcgccggttaaggctaaactgaaaggacaagttttggtgactgcgctcctccaagccagttacctcggttcaaagagttggtagctcagagaaccttcgaaaaaccgccctgcaaggcggttttttcgttttcagagcaagagattacgcgcagaccaaaacgatctcaagaagatcatcttattaatcagataaaatatttctagatttcagtgcaatttatctcttcaaatgtagcacctgaagtcagccccatacgatataagttgtaattctcatgttagtcatgccccgcgcccaccggaaggagctgactgggttgaaggctctcaagggcatcggtcgagatcccggtgcctaatgagtgagctaacttacattaattgcgttgcgca

SEQ ID NO: 967 - DNA, 4448 bp, Synthetic construct
  source 1..4448: mol_type = other DNA
acacgatataaaaccatctcattgcttgctgggttaactgagttgctgaatttttttctagaatttcgcaaaatttaataggtaaaccttgtttttttaaatttacgatgatataaaaataatgccctaaacaaaggtttaggggtattgtacaggttgtcaagcctcccacaggtcttggtgaaaccaatcactgtgacgacggtaagcaacacttggatgattgctagaggatggaatgaccttaaatcagggacgatattaaacggaacgtatattcaacgcaatgaagccggaggattggcgtgggaatcgtgcttctgtctaagcaagtaagggtatgaggtcgcaaccgtcccccaagcgtacagggtgcactttgtaacgatttgggagtccagagactcgctgttttcgaaatttgccctcaagcgcgagtattgaaccaggcttacgcccaagaacgtagcaagcattcataattgactccacgctactgattacattatacagcatatctaacatttgcggcgaggttcacaatttgtatttaggtactgattgtggatgagaaggttggagaaagaccacttggttaagccggaggatgtgtcctagaattgtcgctattctgtcatcctccggttttgctaatttcattcagggaatataatggactacaaagaccatgacggtgattataaagatcatgacatcgattacaaggatgacgatgacaagggaggaagcggatcgatgaataatgatgattacccatggttcagaaaacgtggttatttgcatttcgatgaacctgtttcattaaaaaaagcggttaaatatgtttcctctccagaaaaaataataaaacattcttttctgccatttttaagctttgaagtaaaatcgtttaaaatcaaaaaagacaaatcaacaaaacaattaagtaaaactgaaaaattaagacctattgcctattcctcacatttggatagtcatatttatgcattttacgcagaatatcttactggacattatgaattattgatccaagaaaacaatttacacgagaacatccttgccttcagatctttaaataaaagcaatatagaatttgccaagagagcatttgatacaattactgaaatgggtgagtgtagcgctgttgcattagatctttctggtttttttgacaatttagatcatcaaattttgaaacaccagtggtgcaaagttattgggactgaagcgttgccgcaagaccattttgccatatacaaaagtataacaagatattctaaagttgataaaaatagagcgtatgagattttaggtatatcaaagaataaccccaagtataatagacgcaagatctgcacccctgttgattttagaaataagattagaaaaaatggtcttattatagttaataattcccaaaaaggtataccccaaggctcgccaattagtgctctactttcaaatatatatatgcttgactttgatattgaaatgagagattacgcgcaggaacgtggtggccattattatcgctattgtgatgatatgctattcattgtaccaactaagtataataaaactctagcaggtgatgtagcccagcggattaagcatcttaaggtagaactcaatactaagaaaactgagattcgagattttatatacaaagacagtaccttagtggcaaatatgcctttacagtatcttgggtttatttttgatgggagtaatatattattacgttcatcttctctcgcaagatattcggaacgaatgaaaagaggtgtccgcttagcaaaagctacaatggacagcaagaataggattagagaaaataaaggtgaagctttaaaagctttatttaagaaaaaattatatgccagatattcacatattggaagaaggaattttttgacttatggttatcgcgccgcgaagatcatgaattcgaaagctataaaaagacagttaaaaccattgcagaaaagattggaaaatgaaatactaaaataaatatttgctggcccgaatcatacagggccacaatacagttgaaaacaagctataataaacaacatctaatttttatataccgcaataactagcataaccccttggggcctctaaacgggtcttgaggggttttttgctgaaacctcaggcatttgagaagcacacggtcacactgcttccggtagtcaataaaccggtaaaccagcaatagacataagcggctatttaacgaccctgccctgaaccgacgaccgggtcgaatttgctttcgaatttctgccattcatccgcttattatcacttattcaggcgtagcaccaggcgtttaagggcaccaataactgccttaaaaaaattacgccccgccctgccactcatcgcaatactgttgtaattcatttaacattctgccgacatggaagccatcacagacggcatgatgaacctgaatcgccagcggcatcagcaccttgtcgccttgcgtataatatttgcccatagtgaaaacgggggcgaagaagttgtccatattggccacgtttaaatcaaaactggtgaaactcacccagggattggctgagacgaaaaacatattctcaataaaccctttagggaaataggccaggttttcaccgtaacacgccacatcttgcgaatatatgtgtagaaactgccggaaatcgtcgtggtattcactccagagcgatgaaaacgtttcagtttgctcatggaaaacggtgtaacaagggtgaacactatcccatatcaccagctcaccgtctttcatcgccatacggaactctggatgagcattcatcaggcgggcaagaatgtgaataaaggccggataaaacttgtgcttatttttctttacggtctttaaaaaggccgtaatatccagctgaacggtctggttataggtacattgagcaactgactgaaatgcctcaaaatgttctttacgatgccattgggatatatcaacggtggtatatccagtgatttttttctccattttagcttccttagctcctgaaaatctcgataactcaaaaaatacgcccggtagtgatcttatttcattatggtgaaagttggaacctcttacgtgccgatcaacgtctcattttcgccaaaagttggcccagggcttcccggtatcaacagggacaccaggatttatttattctgcgaagtgatcttccgtcacaggtatttattcggcgcaaagtgcgtcgggtgatgctgccaacttactgatttagtgtatgatggtgtttttgaggtgctccagtggcttctgtttctatcagctgtccctcctgttcagctactgacggggtggtgcgtaacggcaaaagcaccgccggacatcagcgctagcggagtgtatactggcttactatgttggcactgatgagggtgtcagtgaagtgcttcatgtggcaggagaaaaaaggctgcaccggtgcgtcagcagaatatgtgatacaggatatattccgcttcctcgctcactgactcgctacgctcggtcgttcgactgcggcgagcggaaatggcttacgaacggggcggagatttcctggaagatgccaggaagatacttaacagggaagtgagagggccgcggcaaagccgtttttccataggctccgcccccctgacaagcatcacgaaatctgacgctcaaatcagtggtggcgaaacccgacaggactataaagataccaggcgtttccccctggcggctccctcgtgcgctctcctgttcctgcctttcggtttaccggtgtcattccgctgttatggccgcgtttgtctcattccacgcctgacactcagttccgggtaggcagttcgctccaagctggactgtatgcacgaaccccccgttcagtccgaccgctgcgccttatccggtaactatcgtcttgagtccaacccggaaagacatgcaaaagcaccactggcagcagccactggtaattgatttagaggagttagtcttgaagtcatgcgccggttaaggctaaactgaaaggacaagttttggtgactgcgctcctccaagccagttacctcggttcaaagagttggtagctcagagaaccttcgaaaaaccgccctgcaaggcggttttttcgttttcagagcaagagattacgcgcagaccaaaacgatctcaagaagatcatcttattaatcagataaaatatttctagatttcagtgcaatttatctcttcaaatgtagcacctgaagtcagccccatacgatataagttgtaattctcatgttagtcatgccccgcgcccaccggaaggagctgactgggttgaaggctctcaagggcatcggtcgagatcccggtgcctaatgagtgagctaacttacattaattgcgttgcgca

SEQ ID NO: 968 - DNA, 4298 bp, Synthetic construct
  source 1..4298: mol_type = other DNA
acacgatataaaaccatctcattgcttgctgggttaactgagttgctgaatttttttctagaatttcgcaaaatttaataggtaaaccttgtttttttaaatttacgatgatataaaaataatgccctaaacaaaggtttaggggtattgtacaggttgtcaagcctcccacaggtcttggtgaaaccaatcactgtgacgacggtaagcaacacttggatgattgctagaggatggaatgaccttaaatcagggacgatattaaacggaacgtccctcaagcgcgagtattgaaccaggcttacgcccaagaacgtagcaagcattcataattgactccacgctactgattacattatacagcatatctaacatttgcggcgaggttcacaatttgtatttaggtactgattgtggatgagaaggttggagaaagaccacttggttaagccggaggatgtgtcctagaattgtcgctattctgtcatcctccggttttgctaatttcattcagggaatataatggactacaaagaccatgacggtgattataaagatcatgacatcgattacaaggatgacgatgacaagggaggaagcggatcgatgaataatgatgattacccatggttcagaaaacgtggttatttgcatttcgatgaacctgtttcattaaaaaaagcggttaaatatgtttcctctccagaaaaaataataaaacattcttttctgccatttttaagctttgaagtaaaatcgtttaaaatcaaaaaagacaaatcaacaaaacaattaagtaaaactgaaaaattaagacctattgcctattcctcacatttggatagtcatatttatgcattttacgcagaatatcttactggacattatgaattattgatccaagaaaacaatttacacgagaacatccttgccttcagatctttaaataaaagcaatatagaatttgccaagagagcatttgatacaattactgaaatgggtgagtgtagcgctgttgcattagatctttctggtttttttgacaatttagatcatcaaattttgaaacaccagtggtgcaaagttattgggactgaagcgttgccgcaagaccattttgccatatacaaaagtataacaagatattctaaagttgataaaaatagagcgtatgagattttaggtatatcaaagaataaccccaagtataatagacgcaagatctgcacccctgttgattttagaaataagattagaaaaaatggtcttattatagttaataattcccaaaaaggtataccccaaggctcgccaattagtgctctactttcaaatatatatatgcttgactttgatattgaaatgagagattacgcgcaggaacgtggtggccattattatcgctattgtgatgatatgctattcattgtaccaactaagtataataaaactctagcaggtgatgtagcccagcggattaagcatcttaaggtagaactcaatactaagaaaactgagattcgagattttatatacaaagacagtaccttagtggcaaatatgcctttacagtatcttgggtttatttttgatgggagtaatatattattacgttcatcttctctcgcaagatattcggaacgaatgaaaagaggtgtccgcttagcaaaagctacaatggacagcaagaataggattagagaaaataaaggtgaagctttaaaagctttatttaagaaaaaattatatgccagatattcacatattggaagaaggaattttttgacttatggttatcgcgccgcgaagatcatgaattcgaaagctataaaaagacagttaaaaccattgcagaaaagattggaaaatgaaatactaaaataaatatttgctggcccgaatcatacagggccacaatacagttgaaaacaagctataataaacaacatctaatttttatataccgcaataactagcataaccccttggggcctctaaacgggtcttgaggggttttttgctgaaacctcaggcatttgagaagcacacggtcacactgcttccggtagtcaataaaccggtaaaccagcaatagacataagcggctatttaacgaccctgccctgaaccgacgaccgggtcgaatttgctttcgaatttctgccattcatccgcttattatcacttattcaggcgtagcaccaggcgtttaagggcaccaataactgccttaaaaaaattacgccccgccctgccactcatcgcaatactgttgtaattcatttaacattctgccgacatggaagccatcacagacggcatgatgaacctgaatcgccagcggcatcagcaccttgtcgccttgcgtataatatttgcccatagtgaaaacgggggcgaagaagttgtccatattggccacgtttaaatcaaaactggtgaaactcacccagggattggctgagacgaaaaacatattctcaataaaccctttagggaaataggccaggttttcaccgtaacacgccacatcttgcgaatatatgtgtagaaactgccggaaatcgtcgtggtattcactccagagcgatgaaaacgtttcagtttgctcatggaaaacggtgtaacaagggtgaacactatcccatatcaccagctcaccgtctttcatcgccatacggaactctggatgagcattcatcaggcgggcaagaatgtgaataaaggccggataaaacttgtgcttatttttctttacggtctttaaaaaggccgtaatatccagctgaacggtctggttataggtacattgagcaactgactgaaatgcctcaaaatgttctttacgatgccattgggatatatcaacggtggtatatccagtgatttttttctccattttagcttccttagctcctgaaaatctcgataactcaaaaaatacgcccggtagtgatcttatttcattatggtgaaagttggaacctcttacgtgccgatcaacgtctcattttcgccaaaagttggcccagggcttcccggtatcaacagggacaccaggatttatttattctgcgaagtgatcttccgtcacaggtatttattcggcgcaaagtgcgtcgggtgatgctgccaacttactgatttagtgtatgatggtgtttttgaggtgctccagtggcttctgtttctatcagctgtccctcctgttcagctactgacggggtggtgcgtaacggcaaaagcaccgccggacatcagcgctagcggagtgtatactggcttactatgttggcactgatgagggtgtcagtgaagtgcttcatgtggcaggagaaaaaaggctgcaccggtgcgtcagcagaatatgtgatacaggatatattccgcttcctcgctcactgactcgctacgctcggtcgttcgactgcggcgagcggaaatggcttacgaacggggcggagatttcctggaagatgccaggaagatacttaacagggaagtgagagggccgcggcaaagccgtttttccataggctccgcccccctgacaagcatcacgaaatctgacgctcaaatcagtggtggcgaaacccgacaggactataaagataccaggcgtttccccctggcggctccctcgtgcgctctcctgttcctgcctttcggtttaccggtgtcattccgctgttatggccgcgtttgtctcattccacgcctgacactcagttccgggtaggcagttcgctccaagctggactgtatgcacgaaccccccgttcagtccgaccgctgcgccttatccggtaactatcgtcttgagtccaacccggaaagacatgcaaaagcaccactggcagcagccactggtaattgatttagaggagttagtcttgaagtcatgcgccggttaaggctaaactgaaaggacaagttttggtgactgcgctcctccaagccagttacctcggttcaaagagttggtagctcagagaaccttcgaaaaaccgccctgcaaggcggttttttcgttttcagagcaagagattacgcgcagaccaaaacgatctcaagaagatcatcttattaatcagataaaatatttctagatttcagtgcaatttatctcttcaaatgtagcacctgaagtcagccccatacgatataagttgtaattctcatgttagtcatgccccgcgcccaccggaaggagctgactgggttgaaggctctcaagggcatcggtcgagatcccggtgcctaatgagtgagctaacttacattaattgcgttgcgca

SEQ ID NO: 969 - DNA, 4414 bp, Synthetic construct
  source 1..4414: mol_type = other DNA
acacgatataaaaccatctcattgcttgctgggttaactgagttgctgaatttttttctagaatttcgcaaaatttaataggtaaaccttgtttttttaaatttacgatgatataaaaataatgccctaaacaaaggtttaggggtattgtacattaaacgtggtctgaccccaccagctggacaccaataaaatattgaagtccacctttgccgtcaaagaccggctgcaagtgcagtaagttccaaaactttttcccggatttcgtgtagttgataagctgaacggtcgtcgggcgacggtcgcggatagcgtcacgaattttttgcaccgtggcttggtcagtttctggcccctgcaaaaaacgcgcgttgcgtcccataatctcttcacgggaatactccgtcaattccaagaaaccatctgaagctgaaatgatcgggtaatcaggcagccaggggtcagtaatcacgaacgatttttccatacatttgcggcgaggttcacaatttgtatttaggtactgattgtggatgagaaggttggagaaagaccacttggttaagccggaggatgtgtcctagaattgtcgctattctgtcatcctccggttttgctaatttcattcagggaatataatggactacaaagaccatgacggtgattataaagatcatgacatcgattacaaggatgacgatgacaagggaggaagcggatcgatgaataatgatgattacccatggttcagaaaacgtggttatttgcatttcgatgaacctgtttcattaaaaaaagcggttaaatatgtttcctctccagaaaaaataataaaacattcttttctgccatttttaagctttgaagtaaaatcgtttaaaatcaaaaaagacaaatcaacaaaacaattaagtaaaactgaaaaattaagacctattgcctattcctcacatttggatagtcatatttatgcattttacgcagaatatcttactggacattatgaattattgatccaagaaaacaatttacacgagaacatccttgccttcagatctttaaataaaagcaatatagaatttgccaagagagcatttgatacaattactgaaatgggtgagtgtagcgctgttgcattagatctttctggtttttttgacaatttagatcatcaaattttgaaacaccagtggtgcaaagttattgggactgaagcgttgccgcaagaccattttgccatatacaaaagtataacaagatattctaaagttgataaaaatagagcgtatgagattttaggtatatcaaagaataaccccaagtataatagacgcaagatctgcacccctgttgattttagaaataagattagaaaaaatggtcttattatagttaataattcccaaaaaggtataccccaaggctcgccaattagtgctctactttcaaatatatatatgcttgactttgatattgaaatgagagattacgcgcaggaacgtggtggccattattatcgctattgtgatgatatgctattcattgtaccaactaagtataataaaactctagcaggtgatgtagcccagcggattaagcatcttaaggtagaactcaatactaagaaaactgagattcgagattttatatacaaagacagtaccttagtggcaaatatgcctttacagtatcttgggtttatttttgatgggagtaatatattattacgttcatcttctctcgcaagatattcggaacgaatgaaaagaggtgtccgcttagcaaaagctacaatggacagcaagaataggattagagaaaataaaggtgaagctttaaaagctttatttaagaaaaaattatatgccagatattcacatattggaagaaggaattttttgacttatggttatcgcgccgcgaagatcatgaattcgaaagctataaaaagacagttaaaaccattgcagaaaagattggaaaatgaaatactaaaataaatatttgctggcccgaatcatacagggccacaatacagttgaaaacaagctataataaacaacatctaatttttatataccgcaataactagcataaccccttggggcctctaaacgggtcttgaggggttttttgctgaaacctcaggcatttgagaagcacacggtcacactgcttccggtagtcaataaaccggtaaaccagcaatagacataagcggctatttaacgaccctgccctgaaccgacgaccgggtcgaatttgctttcgaatttctgccattcatccgcttattatcacttattcaggcgtagcaccaggcgtttaagggcaccaataactgccttaaaaaaattacgccccgccctgccactcatcgcaatactgttgtaattcatttaacattctgccgacatggaagccatcacagacggcatgatgaacctgaatcgccagcggcatcagcaccttgtcgccttgcgtataatatttgcccatagtgaaaacgggggcgaagaagttgtccatattggccacgtttaaatcaaaactggtgaaactcacccagggattggctgagacgaaaaacatattctcaataaaccctttagggaaataggccaggttttcaccgtaacacgccacatcttgcgaatatatgtgtagaaactgccggaaatcgtcgtggtattcactccagagcgatgaaaacgtttcagtttgctcatggaaaacggtgtaacaagggtgaacactatcccatatcaccagctcaccgtctttcatcgccatacggaactctggatgagcattcatcaggcgggcaagaatgtgaataaaggccggataaaacttgtgcttatttttctttacggtctttaaaaaggccgtaatatccagctgaacggtctggttataggtacattgagcaactgactgaaatgcctcaaaatgttctttacgatgccattgggatatatcaacggtggtatatccagtgatttttttctccattttagcttccttagctcctgaaaatctcgataactcaaaaaatacgcccggtagtgatcttatttcattatggtgaaagttggaacctcttacgtgccgatcaacgtctcattttcgccaaaagttggcccagggcttcccggtatcaacagggacaccaggatttatttattctgcgaagtgatcttccgtcacaggtatttattcggcgcaaagtgcgtcgggtgatgctgccaacttactgatttagtgtatgatggtgtttttgaggtgctccagtggcttctgtttctatcagctgtccctcctgttcagctactgacggggtggtgcgtaacggcaaaagcaccgccggacatcagcgctagcggagtgtatactggcttactatgttggcactgatgagggtgtcagtgaagtgcttcatgtggcaggagaaaaaaggctgcaccggtgcgtcagcagaatatgtgatacaggatatattccgcttcctcgctcactgactcgctacgctcggtcgttcgactgcggcgagcggaaatggcttacgaacggggcggagatttcctggaagatgccaggaagatacttaacagggaagtgagagggccgcggcaaagccgtttttccataggctccgcccccctgacaagcatcacgaaatctgacgctcaaatcagtggtggcgaaacccgacaggactataaagataccaggcgtttccccctggcggctccctcgtgcgctctcctgttcctgcctttcggtttaccggtgtcattccgctgttatggccgcgtttgtctcattccacgcctgacactcagttccgggtaggcagttcgctccaagctggactgtatgcacgaaccccccgttcagtccgaccgctgcgccttatccggtaactatcgtcttgagtccaacccggaaagacatgcaaaagcaccactggcagcagccactggtaattgatttagaggagttagtcttgaagtcatgcgccggttaaggctaaactgaaaggacaagttttggtgactgcgctcctccaagccagttacctcggttcaaagagttggtagctcagagaaccttcgaaaaaccgccctgcaaggcggttttttcgttttcagagcaagagattacgcgcagaccaaaacgatctcaagaagatcatcttattaatcagataaaatatttctagatttcagtgcaatttatctcttcaaatgtagcacctgaagtcagccccatacgatataagttgtaattctcatgttagtcatgccccgcgcccaccggaaggagctgactgggttgaaggctctcaagggcatcggtcgagatcccggtgcctaatgagtgagctaacttacattaattgcgttgcgca

SEQ ID NO: 970 - DNA, 6811 bp, Synthetic construct
  source 1..6811: mol_type = other DNA
gacattgattattgactagttattaatagtaatcaattacggggtcattagttcatagcccatatatggagttccgcgttacataacttacggtaaatggcccgcctggctgaccgcccaacgacccccgcccattgacgtcaataatgacgtatgttcccatagtaacgccaatagggactttccattgacgtcaatgggtggagtatttacggtaaactgcccacttggcagtacatcaagtgtatcatatgccaagtacgccccctattgacgtcaatgacggtaaatggcccgcctggcattatgcccagtacatgaccttatgggactttcctacttggcagtacatctacgtattagtcatcgctattaccatggtgatgcggttttggcagtacatcaatgggcgtggatagcggtttgactcacggggatttccaagtctccaccccattgacgtcaatgggagtttgttttggcaccaaaatcaacgggactttccaaaatgtcgtaacaactccgccccattgacgcaaatgggcggtaggcgtgtacggtgggaggtctatataagcagagctctctggctaactagagaacccactgcttactggcttatcgaaattaatacgactcactatagggagacccaagctggctagcgtttaaacttaagcttggtaccgagctcggatccgccaccatgggcaaacggacagccgacggaagcgagttcgagtcaccgaaaaagaagcgaaaagttggctccggaatggattataaggaccatgatggcgactacaaggaccacgacatcgactataaggacgatgacgataagggcggatctggctccatgaacaacgacgactacccctggttcagaaagcggggctacctgcactttgacgagcctgtgtctctgaagaaagccgtgaagtacgtgtcctcccctgagaagatcatcaaacacagcttcctgccattcctgagtttcgaggtgaagtctttcaagatcaagaaagacaagtctacaaagcagctgagcaaaaccgaaaagctgcggcctatcgcctactcttctcacctggactctcacatctacgccttctacgccgagtacctgaccggccactacgagctgctgatccaggagaacaatctgcacgaaaacatcctggcctttcggagcctgaataagagcaacatcgagttcgccaagagagccttcgatacaatcacagagatgggcgaatgcagcgccgtggctctggacctgtccggcttcttcgacaacctggatcaccaaatcctgaagcaccagtggtgcaaggtcatcggcaccgaagcccttcctcaggaccacttcgccatctacaagtccattaccagatatagcaaggttgacaagaatagagcttacgagattctgggcatcagcaagaacaaccccaagtacaatcggagaaagatctgtacccctgtggacttcagaaacaaaatccgaaagaacggcctgattatcgtgaacaacagccagaaaggaatcccccaaggcagccccatctccgccctgctgagcaatatctacatgctggacttcgacatcgagatgcgggactacgctcaggagcggggaggccactactacagatactgcgacgacatgctgtttatcgtgccaaccaagtacaacaagaccctcgctggcgatgtggcccagagaatcaagcacctgaaagtggaactgaacaccaagaaaaccgaaatcagagattttatctacaaggatagcaccctggtggccaacatgcctctgcagtacctgggcttcatcttcgacggcagcaacatcctccttagaagcagcagcctcgccagatacagcgagagaatgaaacgcggagtgcggctggccaaggccacaatggatagcaagaacagaatcagagaaaacaagggcgaggccctgaaggccctgttcaagaaaaagctgtacgccagatacagccatatcgggagaagaaacttcctgacctacggctatagagccgctaagattatgaacagcaaggctatcaagagacagctgaaacctctgcagaagagactggaaaatgagatcctgaagtgaagtctagagggcccgtttaaacccgctgatcagcctcgactgtgccttctagttgccagccatctgttgtttgcccctcccccgtgccttccttgaccctggaaggtgccactcccactgtcctttcctaataaaatgaggaaattgcatcgcattgtctgagtaggtgtcattctattctggggggtggggtggggcaggacagcaagggggaggattgggaagacaatagcaggcatgctggggatgcggtgggctctatggcttctgaggcggaaagaaccagctggggctctagggggtatccccacgcgccctgtagcggcgcattaagcgcggcgggtgtggtggttacgcgcagcgtgaccgctacacttgccagcgccctagcgcccgctcctttcgctttcttcccttcctttctcgccacgttcgccggctttccccgtcaagctctaaatcgggggctccctttagggttccgatttagtgctttacggcacctcgaccccaaaaaacttgattagggtgatggttcacgtagtgggccatcgccctgatagacggtttttcgccctttgacgttggagtccacgttctttaatagtggactcttgttccaaactggaacaacactcaaccctatctcggtctattcttttgatttataagggattttgccgatttcggcctattggttaaaaaatgagctgatttaacaaaaatttaacgcgaattaattctgtggaatgtgtgtcagttagggtgtggaaagtccccaggctccccagcaggcagaagtatgcaaagcatgcatctcaattagtcagcaaccaggtgtggaaagtccccaggctccccagcaggcagaagtatgcaaagcatgcatctcaattagtcagcaaccatagtcccgcccctaactccgcccatcccgcccctaactccgcccagttccgcccattctccgccccatggctgactaattttttttatttatgcagaggccgaggccgcctctgcctctgagctattccagaagtagtgaggaggcttttttggaggcctaggcttttgcaaaaagctcccgggagcttgtatatccattttcggatctgatcaagagacaggatgaggatcgtttcgcatgattgaacaagatggattgcacgcaggttctccggccgcttgggtggagaggctattcggctatgactgggcacaacagacaatcggctgctctgatgccgccgtgttccggctgtcagcgcaggggcgcccggttctttttgtcaagaccgacctgtccggtgccctgaatgaactgcaggacgaggcagcgcggctatcgtggctggccacgacgggcgttccttgcgcagctgtgctcgacgttgtcactgaagcgggaagggactggctgctattgggcgaagtgccggggcaggatctcctgtcatctcaccttgctcctgccgagaaagtatccatcatggctgatgcaatgcggcggctgcatacgcttgatccggctacctgcccattcgaccaccaagcgaaacatcgcatcgagcgagcacgtactcggatggaagccggtcttgtcgatcaggatgatctggacgaagagcatcaggggctcgcgccagccgaactgttcgccaggctcaaggcgcgcatgcccgacggcgaggatctcgtcgtgacccatggcgatgcctgcttgccgaatatcatggtggaaaatggccgcttttctggattcatcgactgtggccggctgggtgtggcggaccgctatcaggacatagcgttggctacccgtgatattgctgaagagcttggcggcgaatgggctgaccgcttcctcgtgctttacggtatcgccgctcccgattcgcagcgcatcgccttctatcgccttcttgacgagttcttctgagcgggactctggggttcgaaatgaccgaccaagcgacgcccaacctgccatcacgagatttcgattccaccgccgccttctatgaaaggttgggcttcggaatcgttttccgggacgccggctggatgatcctccagcgcggggatctcatgctggagttcttcgcccaccccaacttgtttattgcagcttataatggttacaaataaagcaatagcatcacaaatttcacaaataaagcatttttttcactgcattctagttgtggtttgtccaaactcatcaatgtatcttatcatgtctgtataccgtcgacctctagctagagcttggcgtaatcatggtcatagctgtttcctgtgtgaaattgttatccgctcacaattccacacaacatacgagccggaagcataaagtgtaaagcctggggtgcctaatgagtgagctaactcacattaattgcgttgcgctcactgcccgctttccagtcgggaaacctgtcgtgccagctgcattaatgaatcggccaacgcgcggggagaggcggtttgcgtattgggcgctcttccgcttcctcgctcactgactcgctgcgctcggtcgttcggctgcggcgagcggtatcagctcactcaaaggcggtaatacggttatccacagaatcaggggataacgcaggaaagaacatgtgagcaaaaggccagcaaaaggccaggaaccgtaaaaaggccgcgttgctggcgtttttccataggctccgcccccctgacgagcatcacaaaaatcgacgctcaagtcagaggtggcgaaacccgacaggactataaagataccaggcgtttccccctggaagctccctcgtgcgctctcctgttccgaccctgccgcttaccggatacctgtccgcctttctcccttcgggaagcgtggcgctttctcatagctcacgctgtaggtatctcagttcggtgtaggtcgttcgctccaagctgggctgtgtgcacgaaccccccgttcagcccgaccgctgcgccttatccggtaactatcgtcttgagtccaacccggtaagacacgacttatcgccactggcagcagccactggtaacaggattagcagagcgaggtatgtaggcggtgctacagagttcttgaagtggtggcctaactacggctacactagaagaacagtatttggtatctgcgctctgctgaagccagttaccttcggaaaaagagttggtagctcttgatccggcaaacaaaccaccgctggtagcggtttttttgtttgcaagcagcagattacgcgcagaaaaaaaggatctcaagaagatcctttgatcttttctacggggtctgacgctcagtggaacgaaaactcacgttaagggattttggtcatgagattatcaaaaaggatcttcacctagatccttttaaattaaaaatgaagttttaaatcaatctaaagtatatatgagtaaacttggtctgacagttaccaatgcttaatcagtgaggcacctatctcagcgatctgtctatttcgttcatccatagttgcctgactccccgtcgtgtagataactacgatacgggagggcttaccatctggccccagtgctgcaatgataccgcgagacccacgctcaccggctccagatttatcagcaataaaccagccagccggaagggccgagcgcagaagtggtcctgcaactttatccgcctccatccagtctattaattgttgccgggaagctagagtaagtagttcgccagttaatagtttgcgcaacgttgttgccattgctacaggcatcgtggtgtcacgctcgtcgtttggtatggcttcattcagctccggttcccaacgatcaaggcgagttacatgatcccccatgttgtgcaaaaaagcggttagctccttcggtcctccgatcgttgtcagaagtaagttggccgcagtgttatcactcatggttatggcagcactgcataattctcttactgtcatgccatccgtaagatgcttttctgtgactggtgagtactcaaccaagtcattctgagaatagtgtatgcggcgaccgagttgctcttgcccggcgtcaatacgggataataccgcgccacatagcagaactttaaaagtgctcatcattggaaaacgttcttcggggcgaaaactctcaaggatcttaccgctgttgagatccagttcgatgtaacccactcgtgcacccaactgatcttcagcatcttttactttcaccagcgtttctgggtgagcaaaaacaggaaggcaaaatgccgcaaaaaagggaataagggcgacacggaaatgttgaatactcatactcttcctttttcaatattattgaagcatttatcagggttattgtctcatgagcggatacatatttgaatgtatttagaaaaataaacaaataggggttccgcgcacatttccccgaaaagtgccacctgacgtcgacggatcgggagatctcccgatcccctatggtgcactctcagtacaatctgctctgatgccgcatagttaagccagtatctgctccctgcttgtgtgttggaggtcgctgagtagtgcgcgagcaaaatttaagctacaacaaggcaaggcttgaccgacaattgcatgaagaatctgcttagggttaggcgttttgcgctgcttcgcgatgtacgggccagatatacgcgtt

SEQ ID NO: 971 - DNA, 5755 bp, Synthetic construct
  source 1..5755: mol_type = other DNA
caaggcgattaagttgggtaacgccagggttttcccagtcacgacgttgtaaaacgacggccagtgagcgcgcgtaatacgactcactatagggcgaattggagctagcgtttaaacctacagttgaagtcggaagtttacatacacttaagttggagtcattaaaactcgtttttcaactactccacaaatttcttgttaacaaacaatagttttggcaagtcagttaggacatctactttgtgcatgacacaagtcatttttccaacaattgtttacagacagattatttcacttataattcactgtatcacaattccagtgggtcagaagtgtacatacacgcgcttgactgtgcctttaagcttgatatccatggaattcactagtgcgcgcggccgcgaattaattgacattgattattgactagttattaatagtaatcaattacggggtcattagttcatagcccatatatggagttccgcgttacataacttacggtaaatggcccgcctggctgaccgcccaacgacccccgcccattgacgtcaataatgacgtatgttcccatagtaacgccaatagggactttccattgacgtcaatgggtggagtatttacggtaaactgcccacttggcagtacatcaagtgtatcatatgccaagtacgccccctattgacgtcaatgacggtaaatggcccgcctggcattatgcccagtacatgaccttatgggactttcctacttggcagtacatctacgtattagtcatcgctattaccatggtgatgcggttttggcagtacatcaatgggcgtggatagcggtttgactcacggggatttccaagtctccaccccattgacgtcaatgggagtttgttttggcaccaaaatcaacgggactttccaaaatgtcgtaacaactccgccccattgacgcaaatgggcggtaggcgtgtacggtgggaggtctatataagcagagctctctggctaactagagaacccactgcttactggcttatcgaaattaatagcactggacatcacgaagcttaccggtagccaccatgaccgagtacaagcccacggtgcgcctcgccacccgcgacgacgtccccagggccgtacgcaccctcgccgccgcgttcgccgactaccccgccacgcgccacaccgtcgatccggaccgccacatcgagcgggtcaccgagctgcaagaactcttcctcacgcgcgtcgggctcgacatcggcaaggtgtgggtcgcggacgacggcgccgcggtggcggtctggaccacgccggagagcgtcgaagcgggggcggtgttcgccgagatcggcccgcgcatggccgagttgagcggttcccggctggccgcgcagcaacagatggaaggcctcctggcgccgcaccggcccaaggagcccgcgtggttcctggccaccgtcggagtctcgcccgaccaccagggcaagggtctgggcagcgccgtcgtgctccccggagtggaggcggccgagcgcgccggggtgcccgccttcctggagacctccgcgccccgcaacctccccttctacgagcggctcggcttcaccgtcaccgccgacgtcgaggtgcccgaaggaccgcgcacctggtgcatgacccgcaagcccggtgccggcagtggagagggcagaggaagtctgctaacatgcggtgacgtcgaggagaatcctggcccagtgagcaagggcgaggagctgttcaccggggtggtgcccatcctggtcgagctggacggcgacgtaaacggccacaagttcagcgtgtccggcgagggcgagggcgatgccacctacggcaagctgaccctgaagttcatctgcaccaccggcaagctgcccgtgccctggcccaccctcgtgaccaccctgacctacggcgtgcagtgcttcagccgctaccccgaccacatgaagcagcacgacttcttcaagtccgccatgcccgaaggctacgtccaggagcgcaccatcttcttcaaggacgacggcaactacaagacccgcgccgaggtgaagttcgagggcgacaccctggtgaaccgcatcgagctgaagggcatcgacttcaaggaggacggcaacatcctggggcacaagctggagtacaactacaacagccacaacgtctatatcatggccgacaagcagaagaacggcatcaaggtgaacttcaagatccgccacaacatcgaggacggcagcgtgcagctcgccgaccactaccagcagaacacccccatcggcgacggccccgtgctgctgcccgacaaccactacctgagcacccagtccgccctgagcaaagaccccaacgagaagcgcgatcacatggtcctgctggagttcgtgaccgccgccgggatcactctcggcatggacgagctgtacaaggaattctaactagagctcgctgatcagcctcgactgtgccttctagttgccagccatctgttgtttgcccctcccccgtgccttccttgaccctggaaggtgccactcccactgtcctttcctaataaaatgaggaaattgcatcgcattgtctgagtaggtgtcattctattctggggggtggggtggggcaggacagcaagggggaggattgggaagagaatagcaggcatgctggggacttactgtctagatggccagatctttaaacaatttaaaggcaatgctaccaaatactaagcgcgtgtatgtacacttctgacccactgggaatgtgatgaaagaaataaaagctgaaatgaatcattctctctactattattctgatatttcacattcttaaaataaagtggtgatcctaactgaccttaagacagggaatctttactcggattaaatgtcaggaattgtgaaaaagtgagtttaaatgtatttggctaaggtgtatgtaaacttccgacttcaactgtagtttaaacgggcccggtacccagcttttgttccctttagtgagggttaattgcgcgcttggcgtaatcatggtcatagctgtttcctgtgtgaaattgttatccgctcacaattccacacaacatacgagccggaagcataaagtgtaaagcctggggtgcctaatgagtgagctaactcacattaattgcgttgcgctcactgcccgctttccagtcgggaaacctgtcgtgccagctgcattaatgaatcggccaacgcgcggggagaggcggtttgcgtattgggcgctcttccgcttcctcgctcactgactcgctgcgctcggtcgttcggctgcggcgagcggtatcagctcactcaaaggcggtaatacggttatccacagaatcaggggataacgcaggaaagaacatgtgagcaaaaggccagcaaaaggccaggaaccgtaaaaaggccgcgttgctggcgtttttccataggctccgcccccctgacgagcatcacaaaaatcgacgctcaagtcagaggtggcgaaacccgacaggactataaagataccaggcgtttccccctggaagctccctcgtgcgctctcctgttccgaccctgccgcttaccggatacctgtccgcctttctcccttcgggaagcgtggcgctttctcatagctcacgctgtaggtatctcagttcggtgtaggtcgttcgctccaagctgggctgtgtgcacgaaccccccgttcagcccgaccgctgcgccttatccggtaactatcgtcttgagtccaacccggtaagacacgacttatcgccactggcagcagccactggtaacaggattagcagagcgaggtatgtaggcggtgctacagagttcttgaagtggtggcctaactacggctacactagaaggacagtatttggtatctgcgctctgctgaagccagttaccttcggaaaaagagttggtagctcttgatccggcaaacaaaccaccgctggtagcggtggtttttttgtttgcaagcagcagattacgcgcagaaaaaaaggatctcaagaagatcctttgatcttttctacggggtctgacgctcagtggaacgaaaactcacgttaagggattttggtcatgagattatcaaaaaggatcttcacctagatccttttaaattaaaaatgaagttttaaatcaatctaaagtatatatgagtaaacttggtctgacagttaccaatgcttaatcagtgaggcacctatctcagcgatctgtctatttcgttcatccatagttgcctgactccccgtcgtgtagataactacgatacgggagggcttaccatctggccccagtgctgcaatgataccgcgagacccacgctcaccggctccagatttatcagcaataaaccagccagccggaagggccgagcgcagaagtggtcctgcaactttatccgcctccatccagtctattaattgttgccgggaagctagagtaagtagttcgccagttaatagtttgcgcaacgttgttgccattgctacaggcatcgtggtgtcacgctcgtcgtttggtatggcttcattcagctccggttcccaacgatcaaggcgagttacatgatcccccatgttgtgcaaaaaagcggttagctccttcggtcctccgatcgttgtcagaagtaagttggccgcagtgttatcactcatggttatggcagcactgcataattctcttactgtcatgccatccgtaagatgcttttctgtgactggtgagtactcaaccaagtcattctgagaatagtgtatgcggcgaccgagttgctcttgcccggcgtcaatacgggataataccgcgccacatagcagaactttaaaagtgctcatcattggaaaacgttcttcggggcgaaaactctcaaggatcttaccgctgttgagatccagttcgatgtaacccactcgtgcacccaactgatcttcagcatcttttactttcaccagcgtttctgggtgagcaaaaacaggaaggcaaaatgccgcaaaaaagggaataagggcgacacggaaatgttgaatactcatactcttcctttttcaatattattgaagcatttatcagggttattgtctcatgagcggatacatatttgaatgtatttagaaaaataaacaaataggggttccgcgcacatttccccgaaaagtgccacctgacgcgccctgtagcggcgcattaagcgcggcgggagtggtggttacgcgcagcgtgaccgctacacttgccagcgccctagcgcccgctcctttcgctttcttcccttcctttctcgccacgttcgccggctttccccgtcaagctctaaatcgggggctccctttagggttccgatttagtgctttacggcacctcgaccccaaaaaacttgattagggtgatggttcacgtagtgggccatcgccctgatagacggtttttcgccctttgacgttggagtccacgttctttaatagtggactcttgttccaaactggaacaacactcaaccctatctcggtctattcttttgatttataagggattttgccgatttcggcctattggttaaaaaatgagctgatttaacaaaaatttaacgcgaattttaacaaaatattaacgcttacaatttccattcgccattcaggctgcgcaactgttgggaagggcgatcggtgcgggcctcttcgctattacgccagctggcgaaagggggatgtgctg

SEQ ID NO: 972 - DNA, 4137 bp, Synthetic construct
  source 1..4137: mol_type = other DNA
gagggcctatttcccatgattccttcatatttgcatatacgatacaaggctgttagagagataattagaattaatttgactgtaaacacaaagatattagtacaaaatacgtgacgtagaaagtaataatttcttgggtagtttgcagttttaaaattatgttttaaaatggactatcatatgcttaccgtaacttgaaagtatttcgatttcttggctttatatatcttgtggaaaggacgaaacaccgccctaaacaaaggtttaggggtattgtacaggttgtcaagcctcccacaggtcttggtgaaaccaatcactgtgacgacggtaagcaacacttggatgatattcataattgactccacgctactgattacattatacagcatatctaacatttgcggcgaggttcacaatttgtatttaggtactgattgtggatgagaaggttggagaaagaccacttggttaagccggaggatgtgtcctagaattgtcgctattctgtcatcctccggttttgctaaggccggcatggtcccagcctcctcgctggcgccggctgggcaacatgcttcggcatggcgaatgggactttttttaagcttgatgcatagcttgagtattctatagtgtcacctaaatagcttggcgtaatcatggtcatagctgtttcctgtgtgaaattgttatccgctcacaattccacacaacatacgagccggaagcataaagtgtaaagcctggggtgcctaatgagtgagctaactcacattaattgcgttgcgctcactgcccgctttccagtcgggaaacctgtcgtgccagctgcattaatgaatcggccaacgcgcggggagaggcggtttgcgtattgggcgctcttccgcttcctcgctcactgactcgctgcgctcggtcgttcggctgcggcgagcggtatcagctcactcaaaggcggtaatacggttatccacagaatcaggggataacgcaggaaagaacatgtgagcaaaaggccagcaaaaggccaggaaccgtaaaaaggccgcgttgctggcgtttttccataggctccgcccccctgacgagcatcacaaaaatcgacgctcaagtcagaggtggcgaaacccgacaggactataaagataccaggcgtttccccctggaagctccctcgtgcgctctcctgttccgaccctgccgcttaccggatacctgtccgcctttctcccttcgggaagcgtggcgctttctcatagctcacgctgtaggtatctcagttcggtgtaggtcgttcgctccaagctgggctgtgtgcacgaaccccccgttcagcccgaccgctgcgccttatccggtaactatcgtcttgagtccaacccggtaagacacgacttatcgccactggcagcagccactggtaacaggattagcagagcgaggtatgtaggcggtgctacagagttcttgaagtggtggcctaactacggctacactagaagaacagtatttggtatctgcgctctgctgaagccagttaccttcggaaaaagagttggtagctcttgatccggcaaacaaaccaccgctggtagcggtggtttttttgtttgcaagcagcagattacgcgcagaaaaaaaggatctcaagaagatcctttgatcttttctacggggtctgacgctcagtggaacgaaaactcacgttaagggattttggtcatgagattatcaaaaaggatcttcacctagatccttttaaattaaaaatgaagttttagcacgtgtcagtcctgctcctcggccacgaagtgcacgcagttgccggccgggtcgcgcagggcgaactcccgcccccacggctgctcgccgatctcggtcatggccggcccggaggcgtcccggaagttcgtggacacgacctccgaccactcggcgtacagctcgtccaggccgcgcacccacacccaggccagggtgttgtccggcaccacctggtcctggaccgcgctgatgaacagggtcacgtcgtcccggaccacaccggcgaagtcgtcctccacgaagtcccgggagaacccgagccggtcggtccagaactcgaccgctccggcgacgtcgcgcgcggtgagcaccggaacggcactggtcaacttggccatggtggccctcctcacgtgctattattgaagcatttatcagggttattgtctcatgagcggatacatatttgaatgtatttagaaaaataaacaaataggggttccgcgcacatttccccgaaaagtgccacctgatgcggtgtgaaataccgcacagatgcgtaaggagaaaataccgcatcaggaaattgtaagcgttaataattcagaagaactcgtcaagaaggcgatagaaggcgatgcgctgcgaatcgggagcggcgataccgtaaagcacgaggaagcggtcagcccattcgccgccaagctcttcagcaatatcacgggtagccaacgctatgtcctgatagcggtccgccacacccagccggccacagtcgatgaatccagaaaagcggccattttccaccatgatattcggcaagcaggcatcgccatgggtcacgacgagatcctcgccgtcgggcatgctcgccttgagcctggcgaacagttcggctggcgcgagcccctgatgctcttcgtccagatcatcctgatcgacaagaccggcttccatccgagtacgtgctcgctcgatgcgatgtttcgcttggtggtcgaatgggcaggtagccggatcaagcgtatgcagccgccgcattgcatcagccatgatggatactttctcggcaggagcaaggtgagatgacaggagatcctgccccggcacttcgcccaatagcagccagtcccttcccgcttcagtgacaacgtcgagcacagctgcgcaaggaacgcccgtcgtggccagccacgatagccgcgctgcctcgtcttgcagttcattcagggcaccggacaggtcggtcttgacaaaaagaaccgggcgcccctgcgctgacagccggaacacggcggcatcagagcagccgattgtctgttgtgcccagtcatagccgaatagcctctccacccaagcggccggagaacctgcgtgcaatccatcttgttcaatcatgcgaaacgatcctcatcctgtctcttgatcagagcttgatcccctgcgccatcagatccttggcggcaagaaagccatccagtttactttgcagggcttcccaaccttaccagagggcgccccagctggcaattccggttcgcttgctgtccataaaaccgcccagtctagctatcgccatgtaagcccactgcaagctacctgctttctctttgcgcttgcgttttcccttgtccagatagcccagtagctgacattcatccggggtcagcaccgtttctgcggactggctttctacgtgaaaaggatctaggtgaagatcctttttgataatctcatgcctgacatttatattccccagaacatcaggttaatggcgtttttgatgtcattttcgcggtggctgagatcagccacttcttccccgataacggagaccggcacactggccatatcggtggtcatcatgcgccagctttcatccccgatatgcaccaccgggtaaagttcacgggagactttatctgacagcagacgtgcactggccagggggatcaccatccgtcgccccggcgtgtcaataatatcactctgtacatccacaaacagacgataacggctctctcttttataggtgtaaaccttaaactgccgtacgtataggctgcgcaactgttgggaagggcgatcggtgcgggcctcttcgctattacgccagctggcgaaagggggatgtgctgcaaggcgattaagttgggtaacgccagggttttcccagtcacgacgttgtaaaacgacggccagtgaattgtaatacgactcactatagggcgaattgggccctctagatgcatgctcgagcggccgccagtgtgatggatatctgcagaattcgccctttgtacaaaaaagcaggctttaaaggaaccaattcagtcgactggatccggtaccaaggtcgggcaggaa

SEQ ID NO: 973 - DNA, 4069 bp, Synthetic construct
  source 1..4069: mol_type = other DNA
gagggcctatttcccatgattccttcatatttgcatatacgatacaaggctgttagagagataattagaattaatttgactgtaaacacaaagatattagtacaaaatacgtgacgtagaaagtaataatttcttgggtagtttgcagttttaaaattatgttttaaaatggactatcatatgcttaccgtaacttgaaagtatttcgatttcttggctttatatatcttgtggaaaggacgaaacaccgccctaaacaaaggtttaggggtattgtacaggttgtcaagcctcccacaggtcttggtgaaaccaatcactgtgacgacggtaagcaacacttggatgatattcataattgactccacgctactgattacattatacagcatatctaacatttgcggcgaggttcacaatttgtatttaggtactgattgtggatgagaaggttggagaaagaccacttggttaagccggaggatgtgtcctagaattgtcgctattctgtcatcctccggttttgctaatttttttaagcttgatgcatagcttgagtattctatagtgtcacctaaatagcttggcgtaatcatggtcatagctgtttcctgtgtgaaattgttatccgctcacaattccacacaacatacgagccggaagcataaagtgtaaagcctggggtgcctaatgagtgagctaactcacattaattgcgttgcgctcactgcccgctttccagtcgggaaacctgtcgtgccagctgcattaatgaatcggccaacgcgcggggagaggcggtttgcgtattgggcgctcttccgcttcctcgctcactgactcgctgcgctcggtcgttcggctgcggcgagcggtatcagctcactcaaaggcggtaatacggttatccacagaatcaggggataacgcaggaaagaacatgtgagcaaaaggccagcaaaaggccaggaaccgtaaaaaggccgcgttgctggcgtttttccataggctccgcccccctgacgagcatcacaaaaatcgacgctcaagtcagaggtggcgaaacccgacaggactataaagataccaggcgtttccccctggaagctccctcgtgcgctctcctgttccgaccctgccgcttaccggatacctgtccgcctttctcccttcgggaagcgtggcgctttctcatagctcacgctgtaggtatctcagttcggtgtaggtcgttcgctccaagctgggctgtgtgcacgaaccccccgttcagcccgaccgctgcgccttatccggtaactatcgtcttgagtccaacccggtaagacacgacttatcgccactggcagcagccactggtaacaggattagcagagcgaggtatgtaggcggtgctacagagttcttgaagtggtggcctaactacggctacactagaagaacagtatttggtatctgcgctctgctgaagccagttaccttcggaaaaagagttggtagctcttgatccggcaaacaaaccaccgctggtagcggtggtttttttgtttgcaagcagcagattacgcgcagaaaaaaaggatctcaagaagatcctttgatcttttctacggggtctgacgctcagtggaacgaaaactcacgttaagggattttggtcatgagattatcaaaaaggatcttcacctagatccttttaaattaaaaatgaagttttagcacgtgtcagtcctgctcctcggccacgaagtgcacgcagttgccggccgggtcgcgcagggcgaactcccgcccccacggctgctcgccgatctcggtcatggccggcccggaggcgtcccggaagttcgtggacacgacctccgaccactcggcgtacagctcgtccaggccgcgcacccacacccaggccagggtgttgtccggcaccacctggtcctggaccgcgctgatgaacagggtcacgtcgtcccggaccacaccggcgaagtcgtcctccacgaagtcccgggagaacccgagccggtcggtccagaactcgaccgctccggcgacgtcgcgcgcggtgagcaccggaacggcactggtcaacttggccatggtggccctcctcacgtgctattattgaagcatttatcagggttattgtctcatgagcggatacatatttgaatgtatttagaaaaataaacaaataggggttccgcgcacatttccccgaaaagtgccacctgatgcggtgtgaaataccgcacagatgcgtaaggagaaaataccgcatcaggaaattgtaagcgttaataattcagaagaactcgtcaagaaggcgatagaaggcgatgcgctgcgaatcgggagcggcgataccgtaaagcacgaggaagcggtcagcccattcgccgccaagctcttcagcaatatcacgggtagccaacgctatgtcctgatagcggtccgccacacccagccggccacagtcgatgaatccagaaaagcggccattttccaccatgatattcggcaagcaggcatcgccatgggtcacgacgagatcctcgccgtcgggcatgctcgccttgagcctggcgaacagttcggctggcgcgagcccctgatgctcttcgtccagatcatcctgatcgacaagaccggcttccatccgagtacgtgctcgctcgatgcgatgtttcgcttggtggtcgaatgggcaggtagccggatcaagcgtatgcagccgccgcattgcatcagccatgatggatactttctcggcaggagcaaggtgagatgacaggagatcctgccccggcacttcgcccaatagcagccagtcccttcccgcttcagtgacaacgtcgagcacagctgcgcaaggaacgcccgtcgtggccagccacgatagccgcgctgcctcgtcttgcagttcattcagggcaccggacaggtcggtcttgacaaaaagaaccgggcgcccctgcgctgacagccggaacacggcggcatcagagcagccgattgtctgttgtgcccagtcatagccgaatagcctctccacccaagcggccggagaacctgcgtgcaatccatcttgttcaatcatgcgaaacgatcctcatcctgtctcttgatcagagcttgatcccctgcgccatcagatccttggcggcaagaaagccatccagtttactttgcagggcttcccaaccttaccagagggcgccccagctggcaattccggttcgcttgctgtccataaaaccgcccagtctagctatcgccatgtaagcccactgcaagctacctgctttctctttgcgcttgcgttttcccttgtccagatagcccagtagctgacattcatccggggtcagcaccgtttctgcggactggctttctacgtgaaaaggatctaggtgaagatcctttttgataatctcatgcctgacatttatattccccagaacatcaggttaatggcgtttttgatgtcattttcgcggtggctgagatcagccacttcttccccgataacggagaccggcacactggccatatcggtggtcatcatgcgccagctttcatccccgatatgcaccaccgggtaaagttcacgggagactttatctgacagcagacgtgcactggccagggggatcaccatccgtcgccccggcgtgtcaataatatcactctgtacatccacaaacagacgataacggctctctcttttataggtgtaaaccttaaactgccgtacgtataggctgcgcaactgttgggaagggcgatcggtgcgggcctcttcgctattacgccagctggcgaaagggggatgtgctgcaaggcgattaagttgggtaacgccagggttttcccagtcacgacgttgtaaaacgacggccagtgaattgtaatacgactcactatagggcgaattgggccctctagatgcatgctcgagcggccgccagtgtgatggatatctgcagaattcgccctttgtacaaaaaagcaggctttaaaggaaccaattcagtcgactggatccggtaccaaggtcgggcaggaa

SEQ ID NO: 974 - DNA, 4087 bp, Synthetic construct
  source 1..4087: mol_type = other DNA
gagggcctatttcccatgattccttcatatttgcatatacgatacaaggctgttagagagataattagaattaatttgactgtaaacacaaagatattagtacaaaatacgtgacgtagaaagtaataatttcttgggtagtttgcagttttaaaattatgttttaaaatggactatcatatgcttaccgtaacttgaaagtatttcgatttcttggctttatatatcttgtggaaaggacgaaacaccgccctaaacaaaggtttaggggtattgtacaggttgtcaagcctcccacaggtcttggtgaaaccaatcactgtgacgacggtaagcaacacttggatgatattcataattgactccacgctactgattacattatacagcatatctaacatttgcggcgaggttcacaatttgtatttaggtactgattgtggatgagaaggttggagaaagaccacttggttaagccggaggatgtgtcctagaattgtcgctattctgtcatcctccggttttgctaatttcattcagggaatatatttttttaagcttgatgcatagcttgagtattctatagtgtcacctaaatagcttggcgtaatcatggtcatagctgtttcctgtgtgaaattgttatccgctcacaattccacacaacatacgagccggaagcataaagtgtaaagcctggggtgcctaatgagtgagctaactcacattaattgcgttgcgctcactgcccgctttccagtcgggaaacctgtcgtgccagctgcattaatgaatcggccaacgcgcggggagaggcggtttgcgtattgggcgctcttccgcttcctcgctcactgactcgctgcgctcggtcgttcggctgcggcgagcggtatcagctcactcaaaggcggtaatacggttatccacagaatcaggggataacgcaggaaagaacatgtgagcaaaaggccagcaaaaggccaggaaccgtaaaaaggccgcgttgctggcgtttttccataggctccgcccccctgacgagcatcacaaaaatcgacgctcaagtcagaggtggcgaaacccgacaggactataaagataccaggcgtttccccctggaagctccctcgtgcgctctcctgttccgaccctgccgcttaccggatacctgtccgcctttctcccttcgggaagcgtggcgctttctcatagctcacgctgtaggtatctcagttcggtgtaggtcgttcgctccaagctgggctgtgtgcacgaaccccccgttcagcccgaccgctgcgccttatccggtaactatcgtcttgagtccaacccggtaagacacgacttatcgccactggcagcagccactggtaacaggattagcagagcgaggtatgtaggcggtgctacagagttcttgaagtggtggcctaactacggctacactagaagaacagtatttggtatctgcgctctgctgaagccagttaccttcggaaaaagagttggtagctcttgatccggcaaacaaaccaccgctggtagcggtggtttttttgtttgcaagcagcagattacgcgcagaaaaaaaggatctcaagaagatcctttgatcttttctacggggtctgacgctcagtggaacgaaaactcacgttaagggattttggtcatgagattatcaaaaaggatcttcacctagatccttttaaattaaaaatgaagttttagcacgtgtcagtcctgctcctcggccacgaagtgcacgcagttgccggccgggtcgcgcagggcgaactcccgcccccacggctgctcgccgatctcggtcatggccggcccggaggcgtcccggaagttcgtggacacgacctccgaccactcggcgtacagctcgtccaggccgcgcacccacacccaggccagggtgttgtccggcaccacctggtcctggaccgcgctgatgaacagggtcacgtcgtcccggaccacaccggcgaagtcgtcctccacgaagtcccgggagaacccgagccggtcggtccagaactcgaccgctccggcgacgtcgcgcgcggtgagcaccggaacggcactggtcaacttggccatggtggccctcctcacgtgctattattgaagcatttatcagggttattgtctcatgagcggatacatatttgaatgtatttagaaaaataaacaaataggggttccgcgcacatttccccgaaaagtgccacctgatgcggtgtgaaataccgcacagatgcgtaaggagaaaataccgcatcaggaaattgtaagcgttaataattcagaagaactcgtcaagaaggcgatagaaggcgatgcgctgcgaatcgggagcggcgataccgtaaagcacgaggaagcggtcagcccattcgccgccaagctcttcagcaatatcacgggtagccaacgctatgtcctgatagcggtccgccacacccagccggccacagtcgatgaatccagaaaagcggccattttccaccatgatattcggcaagcaggcatcgccatgggtcacgacgagatcctcgccgtcgggcatgctcgccttgagcctggcgaacagttcggctggcgcgagcccctgatgctcttcgtccagatcatcctgatcgacaagaccggcttccatccgagtacgtgctcgctcgatgcgatgtttcgcttggtggtcgaatgggcaggtagccggatcaagcgtatgcagccgccgcattgcatcagccatgatggatactttctcggcaggagcaaggtgagatgacaggagatcctgccccggcacttcgcccaatagcagccagtcccttcccgcttcagtgacaacgtcgagcacagctgcgcaaggaacgcccgtcgtggccagccacgatagccgcgctgcctcgtcttgcagttcattcagggcaccggacaggtcggtcttgacaaaaagaaccgggcgcccctgcgctgacagccggaacacggcggcatcagagcagccgattgtctgttgtgcccagtcatagccgaatagcctctccacccaagcggccggagaacctgcgtgcaatccatcttgttcaatcatgcgaaacgatcctcatcctgtctcttgatcagagcttgatcccctgcgccatcagatccttggcggcaagaaagccatccagtttactttgcagggcttcccaaccttaccagagggcgccccagctggcaattccggttcgcttgctgtccataaaaccgcccagtctagctatcgccatgtaagcccactgcaagctacctgctttctctttgcgcttgcgttttcccttgtccagatagcccagtagctgacattcatccggggtcagcaccgtttctgcggactggctttctacgtgaaaaggatctaggtgaagatcctttttgataatctcatgcctgacatttatattccccagaacatcaggttaatggcgtttttgatgtcattttcgcggtggctgagatcagccacttcttccccgataacggagaccggcacactggccatatcggtggtcatcatgcgccagctttcatccccgatatgcaccaccgggtaaagttcacgggagactttatctgacagcagacgtgcactggccagggggatcaccatccgtcgccccggcgtgtcaataatatcactctgtacatccacaaacagacgataacggctctctcttttataggtgtaaaccttaaactgccgtacgtataggctgcgcaactgttgggaagggcgatcggtgcgggcctcttcgctattacgccagctggcgaaagggggatgtgctgcaaggcgattaagttgggtaacgccagggttttcccagtcacgacgttgtaaaacgacggccagtgaattgtaatacgactcactatagggcgaattgggccctctagatgcatgctcgagcggccgccagtgtgatggatatctgcagaattcgccctttgtacaaaaaagcaggctttaaaggaaccaattcagtcgactggatccggtaccaaggtcgggcaggaa

SEQ ID NO: 975 - RNA, 276 nt, Synthetic construct
  source 1..276: mol_type = other RNA
gcttttgatagggacaaataagtcgctgatcaaaaggagcttaacaggttgtcaagtccaatcggcacgccaccaaggcaagctgagcagatagacagcatgaactggaacagggtcttcatagatacctccacggttatagttatagcataatccatttctaacatgacgcggctagagttttaggactcgtggatggttgttttaacaacttggttaagccgaggtaaggcgtgaggaattgccgcagttctaagtctgcctcggttttgctag

SEQ ID NO: 976 - RNA, 251 nt, Synthetic construct
  source 1..251: mol_type = other RNA
gctttacgcgataggcgtgaagggctgtgacagattgtcaatacctttatccttgcagagccaagataaacacattgtcatgaagcgtaagattaccattgtatagtctccatcgcagattacattatatatcatttctaatagatcgcggcgtgtgcctttaggggccagatgattggttaggccagttagttaaagcccaaagggatatacggaaaggccgcatgtccactccctttgggttttgctag

SEQ ID NO: 977 - RNA, 276 nt, Synthetic construct
  source 1..276: mol_type = other RNA
gcttttgatagggacaaataagtcgttgatcaagaggagcttaacaggttgtcaagtccaatcggcaagccactaaggcaagctgagcagatagacagcaggaactggaacagggtcttcatagatacctccacggttatagttatagcataatccatttctaacatgacgcggctagagttttaggactcgtggatggttgttttaacaacttggttaagccgaggtaaggcgagaggaattgccgcagttctaagtctgcctcggttttgctag

SEQ ID NO: 978 - RNA, 281 nt, Synthetic construct
  source 1..281: mol_type = other RNA
gcttcgggtacagatccgaaggtgcatcacaagctgtcaagccccaaggcggcatcccaggtgtaacagcccagggtgaccagcaatgcggccagcagccctcggatacttatattcataggtactccaagggtgacgctgacactatacgtcgatcctagcaatcgcggcgaaatcggaactgggtgaccaacaccggttggatgatttgaggagcatttgagtttatccggtcaggcggctgaggattgccgccatcctatgcctggccggttggctcg

SEQ ID NO: 979 - RNA, 276 nt, Synthetic construct
  source 1..276: mol_type = other RNA
gctttttatagggacaaataagtcgctgatcaaaaggagcttaacaggttgtcaagtccaatcggcacgccaccaaggcaagctgagcagatagacagcatgaactggaacagggtcttcatagatacctccacggttatagttatagcataatccatttctaacatgacgcggctagagttttaggactcgtggatggttgttttaacaacttggttaagccgaggtaaggcgtgaggaattgccgcagttctaagtctgcctcggttttgctag

SEQ ID NO: 980 - RNA, 260 nt, Synthetic construct; identical to SEQ ID NO: 831
  source 1..260: mol_type = other RNA

SEQ ID NO: 981 - RNA, 276 nt, Synthetic construct
  source 1..276: mol_type = other RNA
gcttttgatagggacaaatgagtcgttgatcaaaaggagcttaacaggttgtcaagtccaatcggcacgccaccaaggcaagctgagcagatagacagcaggaactggaacagggtcttcatagatacctccacggttatagttatagcataatccatttctaacatgacgcggctagagtttcaggactcgtggatggttgttttaacaacttggttaagccgaggtaaggcgtgaggaattgccgcagttctaagtctgcctcggttttgctag

SEQ ID NO: 982 - RNA, 283 nt, Synthetic construct
  source 1..283: mol_type = other RNA
gctttggatgtagatccaaaggtgcatcacaagctgtcaaggcccatcgcggcaccacaggtgaaataacccagggtgaccagcagtgcggccagcagcgctcggatacttattctcataggtactccaagtgtgacgctgacattatacgtcgatcctagcaatcgcggcgaaatcggaactgggtgactaagaccgattggatgatgtgaggagcattttggtttatccggccaggcggcttatgggattgccgccatcctaagcctggccggttggctaa

SEQ ID NO: 983 - RNA, 199 nt, Synthetic construct
  source 1..199: mol_type = other RNA
cgcgggcgcaaggcccgcgagtcatgggttgaccctgtcaagggccggcgacgagatcaggtcgatgaacaacgagatcatctccttggttggttcgccggactgttccggcaggacggccagaagtccgatgaggacggcacggccagcatacctcagcatgtcgaatgactggcagcatgagaggctcctccggggt

SEQ ID NO: 984 - RNA, 276 nt, Synthetic construct
  source 1..276: mol_type = other RNA
gcttttggtaggggcttattagttcctgatcaaaaggaacttaacaggttgtcaactcccagcggtatgccaataaggcaagctgagcagatagacagcaggaactggaatagggtcttcatagatacctccacggttatagttacagtataatccatttctaacatgacgcggctagagtcttcggattcgtggatggttgttttaacaacttggttaagccgaggtaaggcgtaaggaattgccgcagttctaagtctgcctcggttttgctag

SEQ ID NO: 985 - RNA, 212 nt, Synthetic construct
  source 1..212: mol_type = other RNA
gcctcaggcgctaggcttgagcgaggtgtgttaaggaccgcaagcgccgttcgcgcaagcgggatccaggtcgctgggctcatcgcttggtctcctctgcagtcagcagttccaacataccacactaggttgaaaacgaactcgggccgcagggcttggggagctaggtaagatagccaggacattggacgaacggagtcattatgtcctgg

SEQ ID NO: 986 - RNA, 281 nt, Synthetic construct
  source 1..281: mol_type = other RNA
gctttggatatagatccaaaggtgcatcacaagctgtcaagccccaaggcggcatcccaggtgtaacagcccagggtgaccagcaatgcggccagcagccctcggatacttatcttcataggtactccaagtgtgacgctgacactatacgtcgatcctagcaatcgcggcgaaatcggaactgggtgactgagaccgattggataatgtgaggagcatttgagtttatccggccaggcggctgaggattgccgccatcctatgcctggccggttggctcg

SEQ ID NO: 987 - RNA, 283 nt, Synthetic construct; identical to SEQ ID NO: 834
  source 1..283: mol_type = other RNA

SEQ ID NO: 988 - RNA, 273 nt, Synthetic construct
  source 1..273: mol_type = other RNA
gcttttgatagaggcaaataagtcgctgatcaaaaggagcttaacaggctgtcaagtccaatcggaatgcaaccaaagcaaactgagcagatagacagcaggaactggaacaaggtcttcatagatacttccacggttatagttatagtataatccatttctaacattacgcggctagagtccatggattcaacggttgtttaaacaacttggttaagccgaggtaaggcgttccgaattgccgcagttctaagtctgcctcggttttgctag

SEQ ID NO: 989 - RNA, 232 nt, Synthetic construct
  source 1..232: mol_type = other RNA
gcgttggggaggggcggagtagttagtttataccgtcaacggtgattcggatcagcgtagcgtgcatgatgaatgcgccttcctgggacgggtcgaggtgactggcgatgaaatcgccggaataccatgtgacagtataatcgcttaggtcgataattgtccaaacagagtaggattctactcgcggaaggtagtgttggggtagagggctagccggattggacccggttcc

SEQ ID NO: 990 - RNA, 302 nt, Synthetic construct
  source 1..302: mol_type = other RNA
gcctcataaaagtagttatggggggaattggtggatttcttgcaagccttatctcaattgtaacggcaaggtttaccgagctcagtacaatcgataatgcttctgagtaacttggcatttggatacctccattcgtcataatcaaccaactcagtatactaagtatagtataagctatcagtgcgtttagtggcccatttataggttagaaatagtctataatttgaaaggagagtatgcttgcaagggtttctttaacagagtaataggctacgattatttacccttgctagctctaccaa

SEQ ID NO: 991 - RNA, 302 nt, Synthetic construct
  source 1..302: mol_type = other RNA
gcctcataaaagtagttatgagggaaattggtgaacttcttgcaagccttatctcaattgtaacggtaagatttaccgagctaagtacaatcgataatgcttctaagtaatttggcatttggaaacctccattcgtcataagcaaccaattcagtatactaagtatagtataaactgttagtgagtttagtggcccatttataggttagaaatagtctgtaatttgaaaggagagtatgcttgcaagggtttcttaaaaagagtaataggctacgattacatacccttgttagctctaccag

SEQ ID NO: 992 - RNA, 244 nt, Synthetic construct
  source 1..244: mol_type = other RNA
gtcttcaggctggggggaccggagcgtcagttgaaactgtcaagccctaaatgagcggcgattagtacgatgaggttcatagtaatctccagtatccgccggtcgtcacgggacgccagagcgcgtagcgccatggtgacagtatagacgatttcgtcgacttggacccgcagtcctagggttgaagacagcccgttcaaacggtgtggggcgaagagtgctaagccgcatgtgggtcggcaat

SEQ ID NO: 993 - RNA, 276 nt, Synthetic construct
  source 1..276: mol_type = other RNA
gcttttgataggggcaaataagtcgttgatcaaaaggagcttaacaggctgtcaagtccaatcggtatgcccacaaggcaagctgagcagatagacagcaggaactggaatagggtcttcatagatacctccacggttatagttacagtataatccatttctaacatgacgcggctagagcctacgggctcgtggatggttgttttaacaacttggttaagccgaggtaaggcgtaaggaattgccgcagttctaagtctgcctcggttttgctag

SEQ ID NO: 994 - RNA, 276 nt, Synthetic construct
  source 1..276: mol_type = other RNA
gcttttgatagggataattaagtccttgatcaaaaggagcttaacaggttgtcaagtccaatcggcatgccaccaaggcaaactgagcagatagacaacaggaactggaacagggtcttcatagatacctccacggttatagttacagcataatccatttctaacatgacgcggctagagttttaggactcgtggatggttgttttaacaacttggttaagccgaggtaaggcgtaaggaattgccgcagttctaagtctgcctcggttttgctag

SEQ ID NO: 995 - RNA, 276 nt, Synthetic construct
  source 1..276: mol_type = other RNA
gcttttgatagggataattaagtccttgatcaaaaggagcttaacaggttgtcaagtccaatcggcatgccaccaaggcaaactgagcagatatacaacaggaactggaacagggtcttcatagatacctccacggttatagttacagcataatccatttctaacatgacgcggctagagttttaggactcgtggatggttgttttaacaacttggttaagccgaggtaaggcgtaaggaattgccgcagttctaagtctgcctcggttttgctag

SEQ ID NO: 996 - RNA, 276 nt, Synthetic construct
  source 1..276: mol_type = other RNA
gcttttgatagggacaaatgagtcgttgatcaaaaggagcttaacaggttgtcaagtccaatcggcaagccaccaaggcaagctgagcagatagacagcaggaactggaacagggtcttcatagatacctccacggttatagttatagcataatccatttctaacatgacgcggctagagtttcaggactcgtggatggttgttttaacaacttggttaagccgaggtaaggcgtgaggaattgccgcagttctaagtctgcctcggttttgctag

SEQ ID NO: 997 - RNA, 276 nt, Synthetic construct
  source 1..276: mol_type = other RNA
gcttttgataggggcaaacaagtcgttgatcaaaaggagcgtaacaggttgtcaagtccaatcggcacgccaccaaggcaagctgagcagatagacagcagaaactggaacagggtcttcatagatacctccacgattatagttatagcataatccatttctaacatgacgcggctagagttttcggactcatggatggttgttttaacaacttggttaagccgaggtaaggcgagaggaattgccgcagttctaagtctgcctcggttttgctag

SEQ ID NO: 998 - RNA, 281 nt, Synthetic construct; identical to SEQ ID NO: 827
  source 1..281: mol_type = other RNA

SEQ ID NO: 999 - RNA, 274 nt, Synthetic construct
  source 1..274: mol_type = other RNA
gcccgtctaatttgtaggcgggggtgtccttatcacgccagggcagcgtgcgctagcgcacgtcgaccagcggaacactgtgatcaagatgatccgggtcagttcgaccacgattgtctccataagttcctccgtgagcaggctatacaagtatcttgtatatgtgtggctaaaccccggtaaccgactggggtgggtagggtctccttagatggggcctgtgctgtaccagcagggggggcatgcggtcgccacagccagccccgccctgtag

SEQ ID NO: 1000 - RNA, 240 nt, Synthetic construct
  source 1..240: mol_type = other RNA
gccccgagatgagttcgctggacttggggggactaggttaatggacgcaagggcgatcttcaccgaggtgaggagtaacttgcaccagatcgcggattgcccggtgggcatgatgaggtctccatgaccggcgtcacgactatacgccagaatgttaatgccgtggccggtccaggccggaacatcatcgtgaatgcagccgggggagcgcaagggttgaacggcacccgcccccggcgc

SEQ ID NO: 1001 - RNA, 273 nt, Synthetic construct
  source 1..273: mol_type = other RNA
gcttttgatagaggcaaataagtcgctgatcaaaaggagcttaacaggctgtcaagtccaatcggaatgcaaccaaagcaaactgagcagatagacagtaggaactggaacaaggtcttcatagatacttccacggttatagttatagtataatccatttctaacattacgcggctagagtccatggattcaacggttgtttaaacaacttggttaagccgaggtaaggcgttccgaattgccgcagttctaagtctgcctcggttttgctag

SEQ ID NO: 1002 - RNA, 238 nt, Synthetic construct
  source 1..238: mol_type = other RNA
ggcgctcaattgggggctgccagttacgtgtttaaactgtcaaggccaacctccggggcggtgcagattgcgagttccataattcgggctcctttcgccagccacgcgggcggctttgcggcaatccggcaataccacattgccaggtgcgtcacagtatacacgaccacgtcgacgacgaacgcacaccgcacaacggcgggggcgaagatgttaagggtcagtgcgttgatccaat

SEQ ID NO: 1003 - RNA, 236 nt, Synthetic construct
  source 1..236: mol_type = other RNA
taggcaataggcctatgcagtttcgtgtttaaactgtcaaggctggcagcaagctcaaccagaatgagcagtatcgtcataggtatttccgttcttgttagtttatgttggcgacagtatgataaagtacattcgtacattaaacttatcacagtatacacgacatcgtcgtaagacacgcttatagtataacggcgggactcagagatgctaacgatataaggcgtatatcggat

SEQ ID NO: 1004 - RNA, 344 nt, Synthetic construct
  source 1..344: mol_type = other RNA
gtcccgtgaaaacggttgcgggagagatgagtttcacatttgtcaaacgttttattcttaagaagttcgacaagtaaccagctgaacgccagatacagtacagcaagttgtaattctggtaagctacttaaacttatcacggttataattgcctccttatagtaattataattgattgttttatagaatctcgcttcgtaataatttatgagaagtacgaggttcagtggtcaacgggcactttgttcatttgaacgaaccccacaacattaggctaggaggttttctgttatgaaacagagtaagggaccacgacaattacataacctttctagctcttctga

SEQ ID NO: 1005 - RNA, 267 nt, Synthetic construct; identical to SEQ ID NO: 832
  source 1..267: mol_type = other RNA

SEQ ID NO: 1006 - RNA, 271 nt, Synthetic construct
  source 1..271: mol_type = other RNA
gcccatccagtaagtggatggggacgctgttaccacgtctgggcagcatccgctagcggatgccacccggccgaccaggacggacacggcgatcaacgtcagtttggcagcgatcacgaacagttcctcagtcagttggtcacaacacaacattgtcatttttgcggctaagtcccggctaccggctgggatgggtagggcacctttagacagggcctgtgctgtagcaacaggggggggtaaggtcgccgcagcctaccccgccctgtag

SEQ ID NO: 1007 - RNA, 227 nt, Synthetic construct
  source 1..227: mol_type = other RNA
gcccttcatgcagttgaaggggcgagtgaacgagttgtcaacaccctgatcacatccgtgaccaggtgggcgactaccggcgcagcgtctataactaggcctgccatcgcgtcctccttacaggtagcacagattaaactaacgcggtttcgaggattttgctatgcagggcggagatgaactcttggttcaggattaccgcagtcccctccgccctgttttgctat

SEQ ID NO: 1008 - RNA, 276 nt, Synthetic construct
  source 1..276: mol_type = other RNA
gcttttgatagggacaaatgagtcgttgatcaaaaggagcttaacaggttgtcaactccaatcggcacgccaccaaggcaagctgagcaaatagacagcaggaactggaacagggtcttcatagatacctccacggttatagttatagcataatccatttctaacatgacgcggctagagtttcaggactcgtggatggttgttttaacaacttggttaagccgaggtaaggcgtgaggaattgccgcagttctaagtctgcctcggttttgctag

SEQ ID NO: 1009 - RNA, 281 nt, Synthetic construct
  source 1..281: mol_type = other RNA
gctttgggtacagatccaaaggtgcatcacaagctgtcaagccccaaggcggcatcccaggtgtaacaacccagggtgaccagcaatgcggccagcagccctcggatacttatcttcataggtactccaagtgtgacgctgacactatacgtcgatcctagcaatcgcggcgaaatcggaactgggtgactgagaccgattggataatgtgaggagcatttgagtttatccggccaggcggctgaggattgccgccatcctatgcctggccggttggctcg

SEQ ID NO: 1010 - RNA, 276 nt, Synthetic construct
  source 1..276: mol_type = other RNA
gcttttgatagggacaaatgagtcgttgatcaaaaggagcttaacaggttgtcaactccaatcggcacgccaccaaggcaagctgagcagatagacagcaggaactggaacagggtcttcatagatacctccacggttatagttatagcataatccatttctaacatgacgcggctagagtttcaggactcgtggatggttgttttaacaacttggttaagccgaggtaaggcgtgaggaattgccgcagttctaagtctgcctcggttttgctag

SEQ ID NO: 1011 - RNA, 281 nt, Synthetic construct; identical to SEQ ID NO: 826
  source 1..281: mol_type = other RNA

SEQ ID NO: 1012 - RNA, 278 nt, Synthetic construct; identical to SEQ ID NO: 830
  source 1..278: mol_type = other RNA

SEQ ID NO: 1013 - RNA, 302 nt, Synthetic construct
  source 1..302: mol_type = other RNA
gcctcataaaagtagttatgggggacattggtgaatttctgtcaagctttatctcaattgtaatcacatggctgacccagctaattacaatcgataacgcttctgaataacttggcatttggatacctccagtcgtcataatcaaccaattcaatatactaattatagtataagctattagtgcatttagtagcctctttataggttagtaatagtctataatttgaaaggagagtatgcttgcaagggtttctttgatagagtaataggctacgattacacacccttgctagctctgccaa

SEQ ID NO: 1014 - RNA, 302 nt, Synthetic construct
  source 1..302: mol_type = other RNA
gcctcataaaagtagttatgaggggaattagtgaatttctgtcaagctttatctcaattgtaatcacaaggctgacccagctaattacaatcgataacgcttctgaataacttggcatttggatacctccaagcgtcataatcaaccaattcaatatactaattatagtataagctattagtgcatttagtagcctctttataggttagcgatggtctataatttgaaaggagagtatgcttgcagggggttctttaatagagtaataggctacgattacatacccttgctagctctgccaa

SEQ ID NO: 1015 - RNA, 262 nt, Synthetic construct
  source 1..262: mol_type = other RNA
gcgacttgagtcgttgatcaaaggtgtctaacaggttgtcaagttctatagggacgccaataaggctaactgagacgaaccacgacaggaactggaatagggtcttcatagatacctccacggtgatagttatatcgtaactcatttctaacatgacgcggctaggttttcgaactcttagatggttgttttaacaacttagttaagccgaggtaagacgtaaggaattgccgcagttctaagtctgcctcggttttgctag

SEQ ID NO: 1016 - RNA, 271 nt, Synthetic construct
  source 1..271: mol_type = other RNA
gctttgatagcgacttgagtcgttgatcaaaggtgtctaacaggttgtcaagttctatagggacgccaataaggctaactgagacgaaccacgacaggaactggaatagggtcttcatagatacctccacggtgatagttatatcgtaactcatttctaacatgacgcggctaggttttcgaactcttagatggttgttttaacaacttagttaagccgaggtaagacgtaaggaattgccgcagttctaagtctgcctcggttttgctag

SEQ ID NO: 1017 - RNA, 284 nt, Synthetic construct
  source 1..284: mol_type = other RNA
atcgtatttaattgggaatacgagtgcaaggtttgatattgtcaatcagatagtcgcacaattgttcgattactatgctaaatagtaagtttacaattcgcatgtcgatatcgttaggcattctacaatcaactcctacgctaatcattataagatgattatataataattgtttatttatgggtccttctgtctttgtattagacaaaagtcagatgattattttgtatgctagggaggtcactgttaatagacccaggttactacctccccagctctgcaaa

SEQ ID NO: 1018 - RNA, 279 nt, Synthetic construct
  source 1..279: mol_type = other RNA
gccctaagcataaggcttaggggtgatgtacagtttgtcaactctcggacagcgaccttcgctgaatacctcccagaggctgattaacaggtggacgatgctcataacggtctccatgatactgattacattatacagtgtttctaacatttgcggtgaaatgcacttagcctacttgtagtgctatgtgtatgagaaggttggataaagaccactttgttaagccggggcaatgtttttctgaacgaccgcagttcgaaattgccccggtttcacaat

SEQ ID NO: 1019 - RNA, 268 nt, Synthetic construct
  source 1..268: mol_type = other RNA
gctccccggatttgccgggtaggaaagtgacaggttgtcaagccacgccgaattgctcgccgagcacagacgcagtgcagacaacacgtagaccgcgatttccatcatatggaactccacgtttatactgacatgatattgcatttctaacattaagcggccaaagcccggatgcaataaccgggtgagataatgtaaagaacattggtgtatatccgggggcgcgtattttggattgccgccaaccgccgctcccccggtttgctag

SEQ ID NO: 1020 - RNA, 251 nt, Synthetic construct
  source 1..251: mol_type = other RNA
gcttcacgcgaaaggcgtggaggtttgtgacagattgtcaatgccgttgcgcttgctgagccaagacaacaacattgtcatgaggtgtacgattatcatcatatagtctccatcgcagattacattatacatcatttctaatagatcgcggcgagtgcctttcggggccagatgattggttaggccagttagttaaagcccaaggggatatacggaaaggccgcatgtccactcctcttgggttttgctag

SEQ ID NO: 1021 - RNA, 263 nt, Synthetic construct
  source 1..263: mol_type = other RNA
gcttagcccttgaggggttaaggtttgccacaagctgtcaaccagaaagttcctgcagcaatgcaagagtcgttcagttgagcagccacagtaagccagtagacacatgtcgaacactcctgtgacaatggtacagtaaatcatatctgacaatcgtggctcgggtcggcaagcaggcccaagatggcgtagtgaattacgtttgttaagcccggagcggagcacggaaggccacaatccatatccgctccgggttttgcaga

SEQ ID NO: 1022 - RNA, 251 nt, Synthetic construct
  source 1..251: mol_type = other RNA
gcttcacgcgaaaggcgtggaggtttgtgacagattgtcaataccgttgcgcttgctgagccaagacaacaacattgtcatgaggtgtacgattatcatcatatagtctccatcgcagattacattatacatcatttctaatagatcgcggcgagtgcctttcggggccagatgattggttaggccagttagttaaagcccaaggggatatacggaaaggccgcatgtccactcctcttgggttttgctag

SEQ ID NO: 1023 - RNA, 268 nt, Synthetic construct
  source 1..268: mol_type = other RNA
gctttgggtatagatccaaaggtgcatcacaagctgtcaagtcccatgacggcaccgacggttacgtaaccgacggtgacgagcaatgagactagcagcccacggatacttatattcataggtactccaagtgtgacgctgacatgatacgtcaatcctagcaatagcggccaagtcaggaaactgattgaagatgtgaggaacatatgggtttatccgatcaggtggttttggattgccgccatcctaagcctgatcggttggctct

SEQ ID NO: 1024 - RNA, 251 nt, Synthetic construct
  source 1..251: mol_type = other RNA
gcttcacgcgaaaggcgtggagggctgtgacagattgtcaatgtatttatccttgcagagccaagataaacacatcgtcatgaagcgtaagattaacatcgtatagtctccatcgcagattacattatacatcatttctaatagatcgcggcgagtgcctttcggggccagatgattggttaggccagttagttaaagcccaagaggatattcggaaaggccgcatgtccactcctcttgggttttgctag

SEQ ID NO: 1025 - RNA, 280 nt, Synthetic construct
  source 1..280: mol_type = other RNA
gccctaagtgtaggcttaggggtgatgtacagttcgtcaactctcggccagcgaccttcgctgcacaccgaccagaggctgacaaacaggtggatgatgctcataaggctctccgtcatgctgattacattatacagtgtttctaacatttgcggtgaaatacacctctgacttacttgtaaatcagagagtatgagaaggttggataaagaccactttgttaagccggggcaatgtttttctgaacgaccgcagttcgaagttgccccggtttcacaat

SEQ ID NO: 1026 - RNA, 281 nt, Synthetic construct
  source 1..281: mol_type = other RNA
gccctaagtgaaggcttaggggtgatgtacagtttgtcaactctcggacagctaacttcgctgcaaaccgaccagagtatgaccaacaagtggacgatgctcataacggtctccatcatactgattacattatacagtgtttctaacatttgcggtgaaatgcgctatttgagctacttgtagttctatgtgtatgagaaggttggataaagaccactttgttaagccggggcaatgtttttctgaatgaccgcagttcgaaattgccccggtttcacaaa

SEQ ID NO: 1027 - RNA, 281 nt, Synthetic construct
  source 1..281: mol_type = other RNA
gccctatgtataggcgtaggggtgatgtacagtttgtcaactcccgggcagcaaccatgactgcattccgcacagaggctggctaacaagtggatgatgctcataagggtctccatgatattaattacattatacagtgtttctaacatttgcggtgaaatgcactatttgactcttttgtagttctttgtgtatgagaaggttggataaagaccactttgttaagccggggcgatgtttttctgaacgaccgcaattcaaaatcgctccggtttcacaat

SEQ ID NO: 1028 - RNA, 279 nt, Synthetic construct
  source 1..279: mol_type = other RNA
gccctaagcataaggcttaggggtgatgtacagtttgtcaactctcggacagcgaccttcgctgaatacctcccagaggctgattaacaggtggacgatgctcataacggtctccatgatactgattacattatacagtgtttctaacatttgcggtgaaatgcacttagcctacttgcagtgctatgtgtatgagaaggttggataaagaccactttgttaagccggggcaatgtttttctgaacgaccgcagttcgaaattgccccggtttcacaat

SEQ ID NO: 1029 - RNA, 252 nt, Synthetic construct
  source 1..252: mol_type = other RNA
gcttcacgcgaaaggcagtggagggttgtgacagattgtcaatgccgttgcgcttgctgagccaagacaacaacattgtcatgaggtgtacgattatcatcatatagtctccatcgcagattacattatacatcatttctaatagatcgcggcgagtgcctttcggggccagatgattggttaggccagttagttaaagcccaaggggatatacggaaaggccgcatgtccactcctcttgggttttgctag

SEQ ID NO: 1030 - RNA, 279 nt, Synthetic construct
  source 1..279: mol_type = other RNA
gccctaagcgtaaggcttaggggtgatgtacaggttgtcaactctcggacagcgaccttcgctgaatacctcccagaggctgattaacaggtggacgatgctcataacggtctccatgatactgattacattatacagtgtttctaacatttgcggtgaaatgcacttagcctacttgtagtgctatgtgtatgagaaggttggataaagaccactttgttaagccggggcaatgtttttctgaacgaccgcagttcgaaattgccccggtttcacaat

SEQ ID NO: 1031 - RNA, 281 nt, Synthetic construct
  source 1..281: mol_type = other RNA
gccctaagcaacggcttaggggtgatgtacagtttgtcaactctctcgtagcaaccctcgcggtattgccaccagaagctgaataacaagtggacgatgctcataacggtctccatgatcctgattacattatacagtgtttctaacatttgcggtgaaatgcactatcgaactatttataggtcaatatgtgtgtgagaaggttggataaaaaccactttgttaagccggggcaatgttttctgaacgaccgcagttcaaagttgctccggtttcacaat

SEQ ID NO: 1032 - RNA, 268 nt, Synthetic construct
  source 1..268: mol_type = other RNA
gctccccggatttgccgggtaggaaagtgacaggttgtcaagccacgccgaattgctcgaagagcatagatgcagagcagacaacacatagaccgcgatttccgtcatacggatctccaagtcgatactgacatgatattgcatttctaacattaagcggccaaagcccggatgcaataaccgggtgagataatgtaaagaacattggtgtatatccgggggtgcgtattttggattgccgccaaccgccgctcccccggtttgctag

SEQ ID NO: 1033 - RNA, 278 nt, Synthetic construct
  source 1..278: mol_type = other RNA
gccctaagtgcagacttgggggaggtgtacagtttgtccagtccgggccagcgagcttcgcaacacgccgaccagagactgaacaacaggtggacgatgctcataacggtctccattaagctgattacattatacagtgtttctaacatttgcggtgaaatgcatctctggttacttgcgaatcagtatgtatgagaaggttggataaagaccactttgttaagccggggcaatgttttttggacgaccgcagttcaaagttgccccggtttcacaat

SEQ ID NO: 1034 - RNA, 281 nt, Synthetic construct
  source 1..281: mol_type = other RNA
gccctaggtgaaggcttaggggtgatgtacagtttgtcaactctcggacagctaacttcgctgcaaaccgaccagagtatgaccaacaagtggacgatgctcataacggtctccataatactgattacattatacagtgtttctaacatttgcggtgaaatgcactatctgagctacttgtagttctatgtgtatgagaaggttggataaagaccactttgttaagccggggcaatatttttctgaatgaccgcagttcgaaattgccccggtttcacaaa

SEQ ID NO: 1035 - RNA, 268 nt, Synthetic construct
  source 1..268: mol_type = other RNA
gctccccggatttgccgggtaggaaagtgacaggttgtcaagccacgccgaattgctcgccgagcacagacgcagtgcagacaacacgtagaccgcgatttccatcatatggaactccacgtttatactgacatgatattgcatttctaacattaagcggccaaagcccggatgcaataaccgggtgagataatgtaaagaacattgatgtatatccgggggtgcgtattttggattgccgccaaccgccgctcccccggtttgctag

SEQ ID NO: 1036 - RNA, 245 nt, Synthetic construct
  source 1..245: mol_type = other RNA
gctctgggtagttagcctttaattgatctagaggtgctgaacaagctgtcaagtccactcactaagcttattgagtagattgacagcaatacatggataagcgtcttcatagatgtctccacagttaatgttacagtaatagcataattggtattgtacataacgcggctttgacggctgtaatggccagttaatccgagagtgtgtaaggaattgccgcagttctacgctctcggttttgcttt

SEQ ID NO: 1037 - RNA, 251 nt, Synthetic construct
  source 1..251: mol_type = other RNA
gctttacgtagagtcgtaaaggtttctaatagtatgtaaatacattcagcttcgttcatgaacaaagctaaatgtatcaacgtaacgggtagagtattcatatattcttcacctcttatcatattatatagtaagtctaatataagcggtgcgaacctttgaataggtcagataattggttaggccagttggttaagccgaagaggatgatacagaaaggccgcttttctatttctcttcggttttactag

SEQ ID NO: 1038 - RNA, 279 nt, Synthetic construct
  source 1..279: mol_type = other RNA
gccctacgcgtaaggcttaggggtgatgtacagtttgtcaactctcggacagcgaccttcgctgaatacctcccagaggctgattaacaggtggacgatgctcataacggtctccatgatactgattacattatacagtgtttctaacatttgcggtgaaatgcacttagcatacttgtagtgctatgtgtatgagaaggttggataaagaccactttgttaagccggggcaatgtttttctgaacgaccgcagttcgaaattgccccggtttcacaat

SEQ ID NO: 1039 - RNA, 278 nt, Synthetic construct
  source 1..278: mol_type = other RNA
gccctacgcataggcgcaggggtgatgtacagtttgtcaactcccggccagcgaccttcgctgaacaccgaccagaggctgactaacaagtggatgatgctcattactgtctccattatgctgattacattatacagtgtttctaacatttgcggtgaaatgcacaatgggctacaagtagccaattgtgtatgagaaggttggataaagaccactttgttaagccggggcaatgtacgttgaatgaccgcagttcaaaattgccccggtttcacaat

SEQ ID NO: 1040 - RNA, 236 nt, Synthetic construct
  source 1..236: mol_type = other RNA
gatgggcgacctggggggccggagttttgcttgaagctgtcaagcccgaaggcagccagcgcgatcattgcgatgtccatctggacctccatgtgaagctggacgctcaaggcgcctgaagagaatatcttcagacagtctatatagtccataatctcgattattcgtgccttagggtgtcacagacccgtcatcaacagtcggggacgagagcataaccggaagcacacggtgct

SEQ ID NO: 1041 - RNA, 261 nt, Synthetic construct
  source 1..261: mol_type = other RNA
gctttatgcattggcataaagggttattacaagttgtcaagtctatttggtaggtaagccaataaacagattgacagcatagttatcgcagggttgcacatttgtagcttcatggtgatttctaagttaatagtatatatcattgctaacatacgcggtttggctcagcttgctgggtgaaatggttcgagaaagtcaacttggtctatccgagagtgcggttattagattaccgccatcttcgcactctcggtttgctag

SEQ ID NO: 1042 - RNA, 228 nt, Synthetic construct
  source 1..228: mol_type = other RNA
gctttctgagagtagctctgaaagggtagaggtttgaaacgtcaaggacaattcgccacatagtgacgattagtatcctgactataattatcttgagactgtgctccgtgtatatcaatgcgattgcacctccatagtaacataacgagtttgttggcgtgcgtgcctcggcataaagatgagtttgtcaccccagagccagatgggcgcgccaacccggctctgggg

SEQ ID NO: 1043 - RNA, 309 nt, Synthetic construct
  source 1..309: mol_type = other RNA
gcctgtttagtttgagcgaacagggacttcagcagactgtcaaggtcaaggtaggcttggaaacttgccgccaaccaagacagggctatccacaggaaatgtatgatgattattgtcatattttcatccttgatagttattgtttgagtataactcatctttagcatatcacgcggtctcataaagttgtaagtcatgcatcattatgtaaacggtgctttttagaagtgctttgctatactaggggctgttaattatctgaactgataattagggactaccgcaatcctaagctcctagttttgctaa

SEQ ID NO: 1044 - RNA, 263 nt, Synthetic construct
  source 1..263: mol_type = other RNA
gctcacgggatagccgctgaggaacatcacaggttgtcaaccacaatcgtgccgctcgccgagcagaacgagaaggatgatagcaaccagactgcgagctgcaccatgcagacctccatgtccatactgagatgatacttcatttctaacatttagcggccaaagcccatgcaaatgggtgagatgatgcaaagagcgtttgtgtatatccgggggagtggcttacaggattgccgccaaccttcattccctcggtttgctag

SEQ ID NO: 1045 - RNA, 271 nt, Synthetic construct
  source 1..271: mol_type = other RNA
gcccaaccgtttagcggtaggggagttcgttaccacgccaggtccgtgcacgcaatacgcgcatacggcccagcggagcagggctatcgttacgacaatggtcagttcgacaacggtctccatgattagttcctccaatacgtggctacacaatcttgtgtttttgcggctaaaggtcagctgccggctgatctgggtagggcctcttagacggggtcgtttagttgcaacagggtgggcaatggtcgccgcagccagcccagccctgtag

SEQ ID NO: 1046 - RNA, 277 nt, Synthetic construct
  source 1..277: mol_type = other RNA
gcccattcattttttgcgaatgggggagtgcttagtacgctaggagagcgaccgcagcatgctgcgaccgccacccggacgaggtgagcgacaaggctcgacatcagttcgaccacaatcgtgaccataagttcctccgaaacgtggctacacaacaatcttgtgtttatgcggttaagcgcggttaccggccgcgtgggtagggtctccatagatggaacctgtgcagtaccaatcagggggggtaaaggtcgccgcagcctgccccgccctgtag

SEQ ID NO: 1047 - RNA, 278 nt, Synthetic construct
  source 1..278: mol_type = other RNA
gcccattcgatttagtgaatggggaagcacttagcacgctaggagggcgcccgcagcatgctgcgatcgccgaccgaacgaggtgagcgacgaggctcgacaacagttcgaccataatcgttaccacaagttcctccgaaacgaggctacaccataatcttgatgtctatgcggttaagcgcggctatcggcctcgcgggtagggtctccttagatggaacctgtgcaatatcaatcaggggggggcaaaggtcgccgcagcctgccccaccctgtag

SEQ ID NO: 1048 - RNA, 255 nt, Synthetic construct
  source 1..255: mol_type = other RNA
gatgggcgacttgggggagcggagaattacttgaagctgtcaagcccgaaggccaccagcagtaatgccatgatgtccatccggacctccgcatgaaactggacgcttaaggtacatgacgagcaatcgtacatgcagctaatatagtccactatctcgactacttgtgccgtagggtattccatacccgttctaaacagttgggggcgaaggataaccggatgcacaacggtccttttgccccctctcgccttt

SEQ ID NO: 1049 - RNA, 280 nt, Synthetic construct
  source 1..280: mol_type = other RNA
gcttcgggtatagacccgaaggtgcatcacaagctgtcaagccccaaggcggcatcccaggtgaaaccacccaaggtgaccagcagtgcggctagcagcgctcggatacttatcttcataggtactccaagtgtgacgctgacattatacgtcgatcctagcaatcgcggcgaaatcggactgggtgaccaacaccgattggatgatgtgaggagcatttgagtttatccggccaggcggttgaggattgccgccatcctatgcctggccggttggctcg

SEQ ID NO: 1050 - RNA, 252 nt, Synthetic construct
  source 1..252: mol_type = other RNA
gctctacgtatagacgtagagggaacgcacatgatgtcaactgcagcccgcgcagacacctgactggcaaaccagactgacaccgccatcgtgacgaggaacagcatcatcgcctccttggtaacatggtaatacatttctaacatacgtggctcgtgtccgcttagcggatgaaatggtagtaagactgctggcctaatccggaggggcgacaaattgatcgccaccatcaaagcccctccggtttgctac

SEQ ID NO: 1051 - RNA, 237 nt, Synthetic construct
  source 1..237: mol_type = other RNA
gctcccgggggtgacagagtactgcttgaagctgtcaagaccgaacgcagccagcaagatatttatggcgatctgcataagatactccatgattgacgactggatgctgaaggttgcggacgcgcacagcgctccacagctaatataggcattcgcctcgatgagtgtgcagcagggcacttcggtgtccgtaataaacagttccgggggagagcataaccggaagcacacggtgct

SEQ ID NO: 1052 - RNA, 257 nt, Synthetic construct
  source 1..257: mol_type = other RNA
gcttgtttcgaagtggggagcaaggggtatcacatgctgtcaagtattaaccaatggttgacacttgaacagacacagataattgttctgtataggtctatcagactcatactagtaactcctgtgataacgatattataaatcatatctgacttagtgtggctgggtaacttagttatctgatgacgtagtaatacgttaactaagcctgaagagaaattggatggccacaatccttactcttcaggttttgcaga

SEQ ID NO: 1053 - RNA, 260 nt, Synthetic construct
  source 1..260: mol_type = other RNA
gctctcgtctttagggcgtgaggtatatcacaagctgtcaagcagaaagttccaaacaatctggaatactaactgtcttgaacagccgcaggtaactactggattcattcctaacactcctgtgataacgatattacacatcatatctgacattcgtggcccggtgccccgcgcactacgaatacgtagtaagatacgtttgttaagcctgaggaagatgctggaaggccacaatcctacacttcttcaggttttgcact

SEQ ID NO: 1054 - RNA, 245 nt, Synthetic construct
  source 1..245: mol_type = other RNA
gccttggctaaatggagtcaggggtatgtcacaggatgtcaagccacccggcccagccggaacagcttggcagctgcaattggatatttagccgcatggcgatctccagagtactgtacgacattgctaacacgcgtggcgacgctgtgccttgtgcatcgcaagatagtgatgagttatcacttggttaagccggggagggtgtaagagattgccacggtctcatccctctccggttttgctat

SEQ ID NO: 1055 - RNA, 250 nt, Synthetic construct
  source 1..250: mol_type = other RNA
gcctactttttcaggaagcagggaagctgtaacagtttgtcaagcacgcattggtatcaatgcgcgacaagacgagcgggattatgatgtgtcgtattgcataaatgcgcctccgtaatcaagttatggtgagtgtactccactcttaacatataatggcattttaaacggggtaataaaagttaccctcggctatactggggagcgctagaattaggactgccataatcctgctccctagttttgctaa

SEQ ID NO: 1056 - RNA, 249 nt, Synthetic construct
  source 1..249: mol_type = other RNA
gcctactttttcaggaagcagggaagctgtaacagtttgtcaagcacgcattggtatcaatgcgcgacaagacgagcgggattatgatgtgtcgtattgcataaatgcgcctccgtaatcaagttatggtgagtgtactccactcttaacatataatggcattttaaacggggtaataaaagttacctcggctatactggggagcgctagaattaggactgccataatcctgctccctagttttgctaa

SEQ ID NO: 1057 - RNA, 229 nt, Synthetic construct
  source 1..229: mol_type = other RNA
ccttggggggcggagagttacttgaagctgtcaagcccgaaggccgccagcaggtatgccatgatgtccatccggacctccaggtatagctggacgctcaaggtacatgacgagcaatcgtacatgcagctaatatagtccattatctcgactacttgtgccgaaagggtattcaatacccgctctaaacagtcgggggcgagaggataaccgaaagcacatcggttct

SEQ ID NO: 1058 - RNA, 238 nt, Synthetic construct
  source 1..238: mol_type = other RNA
gaggggtaaccttgggggacggagagttacttgaagctgtcaagcccgaaggccgccagcaggtatgccatgatgtccatccggacctccaggtatagctggacgctcaaggtacatgacgagcaatcgtacatgcagctaatatagtccattatctcgactacttgtgccgaaagggtattccatacccgctctaaacagtcgggggcgagaggataaccggaagcacatcggttct

SEQ ID NO: 1059 - RNA, 246 nt, Synthetic construct
  source 1..246: mol_type = other RNA
gatgggtgacttgggggagcggagaattacttgaagctgtcaagcccgaaagccgccagcagaattgccatgatgtccatccggacctccatgtgtagctggacgctcaaggtacatggcgagcaatcgtccatgcagctaatatagtccattatctcgactatttgtgccgtaagggtatcccatacccgctttaaacagtcgggggcgaaagattgaccggatgcacaacggttcttttgcccc

SEQ ID NO: 1060 - RNA, 240 nt, Synthetic construct
  source 1..240: mol_type = other RNA
gaggggaaacctgggggatcggagacttacttgaagctgtcaagcccgaaggcggccagcagtaatgcaatgatgatgtccatccggacctccgcatgaagctggacgatgaaggtacatgacgagcaatcgttcatgcagctaatatagtccataatctcgactacttgtgccgcagggtatcccatacccgttgtaaacagtcgggggcgaaaggataaccggacgcacaacggtcct

SEQ ID NO: 1061 - RNA, 238 nt, Synthetic construct
  source 1..238: mol_type = other RNA
gaggggcaacctgggggggcggagaattacttgaagctgtcaagcccgaaggccgccagcaggtatgccatgatgtccatccggacctccaggtatagctggacgctcaaggtacatgacgagcaatcgtacatgcagccaatatagtccattatctcgaatacatgtgccgttagggtatttcatacctgtgctaaacagtcgggggcgaaaggttaactggaagcacaccggtcct

SEQ ID NO: 1062 - RNA, 237 nt, Synthetic construct
  source 1..237: mol_type = other RNA
gaagggcaaccagggggagcggagagttacttgaagctgtcaagcccgaaggccaacagcaggtatgccatgatgtccatccggacctccaggtgtagctgggcgctcaaggtacatgacgagcaatcgtacatgcagctaatatagtccattatctcgactacttgtgccgtagggtattccatacccgctctaaacagtcgggggcgaaaggctaactggatgcacatcggttct

SEQ ID NO: 1063 - RNA, 253 nt, Synthetic construct
  source 1..253: mol_type = other RNA
gctccatatataggtgtggaggggtatcacatgatgtcaagcccagaatcgccgccctccaggacggacttccagactgacagcgccagaatgattggaacgtgcattattgcctccatgaaatgatggtacaacatttctaacgtacgtggcatgctgtgagaaatcatggttgaatggtacgaagagtatcagcctaatccggggaggtgatcagcggatcgccaccatcttcgcttccccggtttgctaa

SEQ ID NO: 1064 - RNA, 268 nt, Synthetic construct
  source 1..268: mol_type = other RNA
gctttgggtatagatccaaaggtgcatcacaagctgtcaagtcccatgacggcaccgacggttacgtaaccgacggtgacgagtaatgagacgagcagcccacggatacttatattcataggtactccaagtgtgacgctgacatgatacgtcaatcctagcaatagcggccaagtcaggaaactgattgaagatgtgaggaacatatgggtttatccgatcaggtggttttggattgccgccatcctaagcctgatcggttggctct

SEQ ID NO: 1065 - RNA, 302 nt, Synthetic construct
  source 1..302: mol_type = other RNA
gcctcgtaaaagtagttatgagggaaattggtgaatttctgtcaagctttatctcaattgtaatcacaaggctgacccagctaattacaatcgataacgcttctgaataacttggcatttggatacctccaatcgtcataattaaccaattcaatatactaattatagtataagctattagtgcatttagtagtctctttataggttcgcaatggtctataatttgaaaggagagtatgcttgcaagggtttctttaatagagtaataggctacgattacatacccttgctagctctgccaa

SEQ ID NO: 1066 - RNA, 302 nt, Synthetic construct
  source 1..302: mol_type = other RNA
gcctcataaaagtagttatgagggaaattggtgaacttcttgcaagccttatctcaattgtcacggtaagatttaccgagctaagtacaatcgataatgcttctaagtaacttggcatttggaaacctccattcgtcataagcaaccaattcagtatactaagtatagtataaactgttagtgagtttagtggcccatttataggttagaaatagtctgtaatttgaaaggagagtatgcttgcaagggtttcttaaaaagagtaataggctacgattacatacccttgttagctctaccag

SEQ ID NO: 1067 - RNA, 283 nt, Synthetic construct
  source 1..283: mol_type = other RNA
gcttttaatatttgcgtaagcaattgattaaaaggtgcttaacaagctgtcaaacctgtccaacaagcttgttgtgcagaatgacagcaatgcatagatgagtgtcttcatagatacctccagtgttactgttacagtgatagcatattcgatattgaacataccgcggctattggtagtttttaaggctacgaatgacggtctctgcacctgttaatatccgaaggagcgctctgatttttcagatggagcgccgcagtcctagctccttcggttttgcccc

SEQ ID NO: 1068 - RNA, 283 nt, Synthetic construct
  source 1..283: mol_type = other RNA
gcttttaatatttgcgtaagcaattgattaaaaggtgcttaacaggctgtcaaacctgtccaacaagcttgttgtgcagaatgacagcaatgcatagatgagtgtcttcatagatacctccagtgttactgttacagtgatagcatattcgatattgaacataccgcggctattggtagtttttaaggctacgaatgacggtctctgcacctgttaatatccgaaggagcgctctgatttttcagatggagcgccgcagtcctagctccttcggttttgcccc

SEQ ID NO: 1069 - RNA, 284 nt, Synthetic construct
  source 1..284: mol_type = other RNA
gcttttaatatttgcataagcgattgattaaaaggagcttaacaggctgtcaaacctgtccaacaagcttgttgtgcagaatgacagcaatgcatagatgagtgtcttcatagatacctccagtgttactgttatagtgatagcatattcgatattgaacataccgcggctattggtaatttttaaactatcaatgacggtctctgcacctgctaatatccgaaggagcgctctgatttattcagaaggagcgccgcaagtcctagctcctttggttttgccct

SEQ ID NO: 1070 - RNA, 270 nt, Synthetic construct
  source 1..270: mol_type = other RNA
gcctttgatgtagatcgaagggagtgttgctggatgtcaagtccgctgatcagactgatcagcagaattgccatccgccagctgcgaaagaagattaatttcattagaaagtatcctttgagtagtagttgtaaatcaacatgataaaccatgtttagcaagtgcgcggcgcgcagttttactacgcggatggtgtctatggacacccggttatgccggagaaggggtgataagatggccgcagtcttttcccttctccggtttggctaa

SEQ ID NO: 1071 - RNA, 254 nt, Synthetic construct
  source 1..254: mol_type = other RNA
gctctatgtataggcatagagggataaaacatgatgtcaatctccctggaatcaagcgcagcgcttgaccggaagatcgacagcacaatcatatagacgatctgcataacgatctccttgattacatggtaatacatttctaacatacgtggcttggctcgattcgtcgggtgtaatggcaagagacagactgctggcctaatccggaggggtaattttagattgccaccatctcaactcctccggtttgctag

SEQ ID NO: 1072 - RNA, 267 nt, Synthetic construct
  source 1..267: mol_type = other RNA
gctcgccggaaattgccagcgaggaaagtgacaggttgtcaagccatgccgggcatctcgtagagagtccaagcattgcgaacagcacgttgacgaagaattccattacgcgaatctccaagttaacactgacatgatactgcattcctaacattagcggccaaagctcgggcttgtcctgagtgagataatgtaaagaacattgatgtatatccgggggggcgtttatttggattgccgccaaccgtcgtctcctcggtttgctag

SEQ ID NO: 1073 - RNA, 252 nt, Synthetic construct
  source 1..252: mol_type = other RNA
gctttacgtgtagtcgtaaaggtttcttatagaatgacaatacattccgcttggttcatgaacaaagccaaatgtatcgccatcgagtgtaggactttcatagtttctccagttgatattacattatatagtatttctaatatatgcggcgcgtaccttgaaaaaggtcagatgattggttaggccagttagttgaagccggggagaataatacagaaaggtcgcttttctatttctcctcggttttgctag

SEQ ID NO: 1074 - RNA, 252 nt, Synthetic construct
  source 1..252: mol_type = other RNA
gctttacgtgtagtcgtaaaggtttcttatagaatgacaatacattccgcttggttcatgaacaaagccaaatgtatagccatcgagtgcaggactttcatagtttctccagttgatattacattatatagtatttctaatatatgcgacgcgtaccttgaaaaaggtcagatgattggttaggccagttagttgaagccggggagaataatgcagaaaggtcgcttttctatttatcctcggttttgctag

SEQ ID NO: 1075 - RNA, 320 nt, Synthetic construct
  source 1..320: mol_type = other RNA
gtctccaaaattggttgtgagagcaattagtttcgaagtttagcaagtttcttaacgttaataaactcgctaaaccaccagatgttgagaaccaacgctattaaactcggatcttcgacattgaataaactaatcacagttataattacctccttatggtaagtgtaacattcgttttaagaagtctctgaaaagggattagtggtcaaagggctatttatccatctggacgaaccccgccaaattatgctaggaggttgatctgtaatgaacagaagtaatggaccacgaggattacatggcctctctagctcttctaa

SEQ ID NO: 1076 - RNA, 261 nt, Synthetic construct
  source 1..261: mol_type = other RNA
gcttacttatttaggaagtaaggtgtatcacaagctgtcaagtagaacgctcaccagtacactggctagcagacgacttgcatggccgcagctgactagtagactcacgtcgaacactcctgcgatgatggtatcatatatcatatctgacattcgtggccggcatcatatcgatgttgtgaatgcgtatttaagtacgtttgttaagcccggattgggaatcggatggccacagtcctttacctttccgggttttgcaat

SEQ ID NO: 1077 - RNA, 261 nt, Synthetic construct
  source 1..261: mol_type = other RNA
gcttacttatttaggaagtaaggtgtatcacaagctgtcaagtagaacgcgcaccagtacactggctagcagacgacttgcatggccgcagatggctagtagactcacgtcgaacactcctgcgatgatggtatcatatatcatatctgacattcgtggccgacatcatatcgatgttgtgaatgcgtatttaagtacgtttgttaagcccggattgggaatcggatggccacagtcctttacctttccgggttttgcaat

SEQ ID NO: 1078 - RNA, 261 nt, Synthetic construct
  source 1..261: mol_type = other RNA
gcttacttatttaggaagtaaggtgtatcacaagctgtcaagtagaaagctcaccagtacactggctagcagacgacttgcatggccgcagatggctagtagactcacgtcgaacactcctgcgatgatggtatcatatatcatatctgacattcgtggccgacatcatatcgatgttgtgaatgcgtatttaagtacgtttgttaagcccggattgggaatcggatggccacagtcctttacctttccgggttttgcaat

SEQ ID NO: 1079 - RNA, 261 nt, Synthetic construct
  source 1..261: mol_type = other RNA
gcttacttatttaggaagtaaggtgtatcacaagctgtcaagtagaacgcgcaccagtacactggctagcagacgacttgcatggccgcagatggctagtagactcacgtcgaacactcctgcgatgatggtatcatatatcatatctgacattcgtggccgacatcatatcggtgttgtgaatgcgtatttaagtacgtttgttaagcccggattgggaatcggatggccacagtcctttacctttccgggttttgcaat

SEQ ID NO: 1080 - RNA, 236 nt, Synthetic construct
  source 1..236: mol_type = other RNA
gaagggtgacctgggggtccggagaattgcttgaagctgtcaagcccgacggcagccagcacgatcattatgacgtccaatcggacctccatgtgaagctggacgctcaaggcccatgaagagaatatcttcatacagccagaatagtccattatctcgattacttgtgccgcagggtatcatacacccgttataaacagtcgggggcgagagcataaccggaagcacacggtgct

SEQ ID NO: 1081 - RNA, 210 nt, Synthetic construct
  source 1..210: mol_type = other RNA
ttgcttgaagctgtcaagcccgaaggcagccagcgcgatcattgcgatgtccatctggacctccatgtgaagctggacgctcaaggcgcctgaagagaatatcttcagacagtctatatagtccataatctcgattattcgtgccttagggtgtcacagacccgtcatcaacagtcggggacgagagcataaccggaagcacacggtgct

SEQ ID NO: 1082 - RNA, 249 nt, Synthetic construct
  source 1..249: mol_type = other RNA
tccggatcacggtcgcgcgtgagtcaagtgtttacactgtcaattgggaagacagtcaatatcatcttaatcaatgggataactcctgtggttagtttcgatatcagcgactgtatcaagatgctggccatggccatcattatctcgataccggcagtataacatgtatcgttgaaaataaggacgatagtggcgcaaatgccatgttaaaatggcggaggtgataacagtactatgcctgctggtgtt

SEQ ID NO: 1083 - RNA, 248 nt, Synthetic construct
  source 1..248: mol_type = other RNA
cccggatcacggtaacgcgtgagtcaagtgtttatactgtcaatcggaaaggcggttaatagcgctgcgatcatcaacattactccgatggttgttcgctttccaatcttcctggtgatgatgccgacaatagtcgacaatatctccgcagtgacagaatagcatgtttcgttaatttaaggacgttagtggcatttgtgccatgatatactggcggaggcaaaaactaaaccatgcctgatggtgtt

SEQ ID NO: 1084 - RNA, 282 nt, Synthetic construct
  source 1..282: mol_type = other RNA
gcttcgggtatagacccgaaggtgcatcacaagctgtcaagccccaaggcggcatcccaggtataacaacccaggttgaccagcaatgcggccagcagccctcggatacttatcttcataggtactccaaatgtgacgctgacactatacgtcgatcctagcaatcgcggcgaaatcggaactgggtgactgagaccgattggataatgtgaggaacatttgggtttatccggccaggcggcttgaggattgccgccatcccaagcctggccggttggctcg

SEQ ID NO: 1085 - RNA, 282 nt, Synthetic construct
  source 1..282: mol_type = other RNA
gcttcgggtatagacctgaaggtgcatcacaagctgtcaagccccaaggcggcatcccaggtgtaacaacccagggtgaccagcaatgcggctagcagccctcggatacttatcttcataggtactccaaatgtgacgctgacactatacgtcgatcctagcaatcgcggcgaaatcgggactgggtgactgagaccgattggataatgtgaggaacatttgggtttatccggccaggcggcttgaggattgccgccatcctaagtctggccggttggctcg

SEQ ID NO: 1086 - RNA, 281 nt, Synthetic construct
  source 1..281: mol_type = other RNA
gctttggatatagatccaaaggtgcatcacaagctgtcaagccccaaggcggtatcccaagtgtaaccacccagggtgaccagcaatgcggccagcagccctcggatacttatattcataggtactccaagtgtgacgctgacactatacgtcgatcctagcaatcgcggcgaaatcggaattgggtgactgataccgattggataatgtgaggaacatttgagtttatccggccaggcggctgaggattgccgccatcctatgcctggccggttggctca

SEQ ID NO: 1087 - RNA, 282 nt, Synthetic construct
  source 1..282: mol_type = other RNA
gctttggatatagatccaaaggtgcatcacaagctgtcaagccccaaggcggcatcccaggtgtaacaacctagggtgaccagcaatgcggccagcagccctcggatacttatcttcataggtactccaaatgtgacgctgacactatacgtcgatcctagcaatcgcggcgaaatcggaactgggtgactgagaccgattggataatgtgaggaacatttgagtttatccggccaggcggcttgaggattgccgccatcctaagcctggccggttggctcg

SEQ ID NO: 1088 - RNA, 281 nt, Synthetic construct
  source 1..281: mol_type = other RNA
gcttcgggtatagatccgaaggtgcatcacaagctgtcaagccccaaggcggcatcccaggtgtaacaacccagggtgaccagcaatgcggccagcagccctcggatacttatcttcataggtactccaagtgtgacgctgacactatacgtcgatcctagcaatcgcggcgaaatcggaactgggtgaccaacaccgattggatgatgtgaggagcatttgagtttatccggccaggcggctgaggattgccgccatcctatgcctggccggttggctcg

SEQ ID NO: 1089 - RNA, 282 nt, Synthetic construct
  source 1..282: mol_type = other RNA
gcttcgggtgtagacccgaaggtgcatcacaagctgtcaagccccaaggcggcatcccaggtgtaacaacccaggttgaccagcaatgcggccagcagccctcggatacttatcttcataggtactccaaatgtgacgctgacactatacgtcgatcctagcaatcgcggcgaaatcggaactgggtaactgagaccgattggataatgtgaggaacatttgggtttatccggccaggcggcttgaggatcgccgccatcctaagcctggccggttggctcg

SEQ ID NO: 1090 - RNA, 281 nt, Synthetic construct
  source 1..281: mol_type = other RNA
gcttcgggtatagacccgaaggtgcatcacaagctgtcaagccccagagcggcatcccaggtataacaacccagggtgaccagcaatgcggccagcagccctcggatacttatcttcataggtactccaagtgtgacgctgacactatacgtcgatcctagcaatcgcggcgaaatcggaattgggtgaccaacaccgattggatgatgtgaggagcatttgagtttatccggccaggcggctgaggattgccgccatcctatgcctggccggttggctcg

SEQ ID NO: 1091 - RNA, 281 nt, Synthetic construct
  source 1..281: mol_type = other RNA
gcttcgggtatagacccggaggtgcatcacaagctgtcaagccccaaggcggcatcccaggtgtaacaacccagggtgaccagcaatgcggccagcagctctcggatacttatcttcataggtactccaagtgtgacgctgacactatacgtcgatcctagcaatcgcggcgaaatcggaactgggcgaccaacaccgattggatgatgtgaggagcatttgagtttatccggccaggcggctgaggattgccgccatcctatgcctggccggttggctcg

SEQ ID NO: 1092 - RNA, 282 nt, Synthetic construct
  source 1..282: mol_type = other RNA
gctttggatatagatccaaaggtgcatcacaagctgtcaagccccaaggcggcatcccaggtgtaacaacccagggtgaccagcaatgcggccagcagccctcggatacttatcttcataggtactccaagtgtgacgctgacactatacgtcgatcctagcaatcgcggcgaaatcggaactgggtgactgagaccgattggacaatgtgaggaacatttgggtttatccggccaggcggcttgaggattgccgccatcctaagcctggccggttggctcg

SEQ ID NO: 1093 - RNA, 273 nt, Synthetic construct
  source 1..273: mol_type = other RNA
gcttcatgtgtaggcatgaaggtgcgcaacaggctgtcaagccccgccaggcaaccagaggtagcgatacctaaggcaaccatggcgacggccagcagcagacgggtaacgtgattcatgcggaaccacactgtaacgctgacataagtatatgtctctcctagcatcaagcggccatatccggactccggtggaaggtgtgaggaacattttggtttatccggccaggcgcccataagattgccgccatcttatgcctggccggttggctaa

SEQ ID NO: 1094 - RNA, 238 nt, Synthetic construct
  source 1..238: mol_type = other RNA
gcacccaattgggggtgtttcagtcacgtgtttaaactgtcaaggccagtttcgcagccggtgcaagacgcgagttcgatcattcgggctcctctcgccagccacgcgggcggctttgcggcaattcggcaataccacattgccagttgtttcacagtatacacgaccacgtcgaagacaaacgcacaccgcagaacggcgggggcggagatgttaagggtcggtgcgttgacccgat

SEQ ID NO: 1095 - RNA, 249 nt, Synthetic construct
  source 1..249: mol_type = other RNA
tccggatcacggtagcgcgtgagtcaagtgtttacacggtcaatcgggaagacagtcaatatcatcttaatcaatgggatagctcctgtggttaggttcgatatcagcgactgtatcaagatgatggccatggccatcattatctcgataccggcagtataacatgtatcgttgaaaataaggacgagagtggcgcgaatgccatgctaaaatggcgggggtgataactataccatgcctactggtgtt

SEQ ID NO: 1096 - RNA, 225 nt, Synthetic construct
  source 1..225: mol_type = other RNA
gcctgagcaaatcggtgcttaggggatgtcacagaaagtcaagccatccggcatagccggagcaacttgatggactcacttggattgtcaacttcatagttgcctccagaacagtgtacgacattgctaacacacgtggccttgatggtgatcgtttgtcactcggttaagccggggagggtataaggggattgccacggtctcatccctctccggttttgctat

SEQ ID NO: 1097 - RNA, 236 nt, Synthetic construct
  source 1..236: mol_type = other RNA
tcccagaagggcgggcgccagttacgtgtttaaactgtcaaggccagcttccggggcggtgcagatcgcgagttccataattcgggctcctttcgccagccacgcgggcggcgttgcggcaatccggcaataccacattgccaggtgcgtcacagtgtatacgaccacgtcaaagacgaacgcacaccgcagaacggcgggggcggagatgttaagggtcagtgcgttgacccaat

SEQ ID NO: 1098 - RNA, 237 nt, Synthetic construct
  source 1..237: mol_type = other RNA
tcggcgcacttggggcgtcgcagtcgatcgtttaaactgtcaagtcctagtgcttctgttacgcataatgcgagttccaatacatgttctcctttatcgtgacctggccgctggacggcaatctggctcagccagaccaccgcttgcacagtatacacgaccacgtcgaagattgagtgtataacgcagaacggtcagggtcggaaatgccatttaagagcgaatacaccgctcaat

SEQ ID NO: 1099 - RNA, 257 nt, Synthetic construct
  source 1..257: mol_type = other RNA
gctctatacaaaggtgtagagggatttcacatgatgtcaagcccgctgaagcccgcaacatggcctgaaagcacaatcgacagcacaatctggacaatgagtttcattattgcctccatgattacatggtaatacatttctaatattcgtggctcggcctgacgttatcaggtgaaatagttggagaaagaccgctggcctaatccggaagggtggctcatagatcgccaccatctctcacctttccggtttgctag

SEQ ID NO: 1100 - RNA, 261 nt, Synthetic construct
  source 1..261: mol_type = other RNA
gcttacttatttaggaagtaaggtgtatcacaagctgtcaagtagaacgctcaccagtacactggctagcagacgacttgcatggccgcagatggctagtagactcacgtcgaacactcctgcgatgatggtatcatatatcatatctgacattcgtggccgacatcatatcggtgttgtgaatgcgtatttaagtacgtttgttaagcccggattgggaatcggatggccacagtcctttacctttccgggttttgcaat

SEQ ID NO: 1101 - RNA, 250 nt, Synthetic construct
  source 1..250: mol_type = other RNA
gctccacgtaaagacgtggaggtgtgttacaagttgtcaattccgcccggcagcgtgatcgccaggacgattgatagcagcgcgatgacaggattccgcaaggatacctccagtagcatgtgaacattgtacgtcattcctaacatatgcggctcggcccctctcggggtgagatggtaagaagattacttggtttatccgggggggcggttagtagaatgccgccatcttagcccttccggtttgctag

SEQ ID NO: 1102 - RNA, 290 nt, Synthetic construct
  source 1..290: mol_type = other RNA
gcttgccgaaaagttggcaaggaacatcacaggatgtcaagcatttgcaagcatacgtgaaaacgagccagagaatgcaacgacatcgcgcaactggggtctagcttcataacgatctccaatgtgattgtgatactgacattatatgtcatctctaacagaagcggcgcatcattgctttcacgagaagcgcaacgagagtaatgatggatggtgagacttagtccacttggttaagccgggggggagcagaatggatggccgcagtccatctcccccggttttgctaa

SEQ ID NO: 1103 - RNA, 264 nt, Synthetic construct
  source 1..264: mol_type = other RNA
gcccgttgtgtaggcagcgggggatgacacaggatgtcaagtcgaaagttaatgtatagacattgctgagataatgacatctggccaatggtcaggatgattagtgttcctatgaacataaagttgtcctccatagtgttagtataacacattcttaacagtcgcggcgcgtacctccgagtacggaaggggttagtaaacctttggctaagccggaagggatatttggatggccgcagtcctactcccttccggttttgcaga

SEQ ID NO: 1104 - RNA, 273 nt, Synthetic construct
  source 1..273: mol_type = other RNA
gcttttgatagaggcaaatatgtcgctgatcaaaaggagcttaacaggctgtcaagtccaatcggaatgcaaccaaagcaaactgagcagatagacagcaggaactggaataaggtcttcatagatacttccaaggttatagttatagtataatccatttctaacattacgcggctagagtccatggattcaacggttgtttaaacaacttggttaagccgaggtaaggcgttccgaattgccgcagttctaagtctgcctcggttttgctag

SEQ ID NO: 1105 - RNA, 333 nt, Synthetic construct
  source 1..333: mol_type = other RNA
gcctctcaggaacggatgccggtcgctgtagagggggagtagttgatgacgtcaacggcgaacttcgccagcgacacgagcctgaatatccacagcgtggctttcagcagcttgcggctcatcttccgacctccatcgttaggttagcacatgtagtttttcgcgttaggtggcgatgctctggtaacgctgccgaatatagtggtccccgacacagtccaatcggcgtggctaattggcattgatagagggggtcgaagtcttccgggggagcggattattgggtaggcgcgacagaacccaggctttgccacgctcccccggacttgctac

SEQ ID NO: 1106 - RNA, 267 nt, Synthetic construct
  source 1..267: mol_type = other RNA
gctcatcggatttgccgatgaggaaagtgacaggttgtcaagccacgcgaatccgctccatgagctgagacgcaacgcggacaacacgtagaacaggacttccgtcatacggacctctacgatgatactgccatgatactgcatttctaacatttagcggccaaagctcagttttcggactgagtgagataatgtgaagaacattgttgtatatccggggaggcggttactggaatgccgccaaccatcgcccccccggtttgctag

SEQ ID NO: 1107 - RNA, 267 nt, Synthetic construct
  source 1..267: mol_type = other RNA
gctcatcggatttgctgatgaggaaagtgacaggttgtcaagccacgcgaatccgctccatgagctgagacgcaacgcggacaacacgtagaacaggacttccgtcatacggacctctacgataatactgccatgatactgcatttctaacatttcgcggccaaagctcagttttcggactgggtgagatagtgtgaagaacattgttgtatatccggggaggcggttactggagcgccgccaaccgtcgcctccccggtttgctag

SEQ ID NO: 1108 - RNA, 261 nt, Synthetic construct
  source 1..261: mol_type = other RNA
gcctaatttatagagattaggggatgctacagtttgtcaaggtactgcaagagaaatcttaaagtaactgacgctatcatgaacattattgtttccatgttactcgggacctccaatgccccatgattattagtatatatcattattaacacatgcggctcgttgcttctgcaacaagatggtgcgatgtaagtcaatccagataagccagcgctaagcttaggatcgccgcaaaaccgattttagcgctggtttagctac

SEQ ID NO: 1109 - RNA, 266 nt, Synthetic construct
  source 1..266: mol_type = other RNA
gctcttcggatatgctggagaggaaagtgacaggttgtcaagccacgccgaacggctccaagagcagagacgcagcgctgataacgcatagactatgatctccgtcatacggacctctacgtcgatactgacatgatacttcatttctaacattagcggccaaagctcggtttttaagctgagtgagataatgtgaagaacattgctgtatatccggggaggcggttattggaatgccgccaaccgtcgtctccccggtttgctag

SEQ ID NO: 1110 - RNA, 269 nt, Synthetic construct
  source 1..269: mol_type = other RNA
gctccgtctgtagagtcggaggtgtatcacaagctgtcaagtagcaattggagccagcaaccataactggtgaccacatgccttgagcagccgcacataacgattagctgaaacatgccgatagttccctgtgacgcaatgatattatacatcatatgtgacatatgagtggcccggcgcggaagcgctatgtatacgtaacaactacgtttgttaagcccaagacggtaccggatggccacagtctaagccgttttgggttttgcaaa

SEQ ID NO: 1111 - RNA, 266 nt, Synthetic construct
  source 1..266: mol_type = other RNA
gctcttcggatttgctggagaggaaagtgacaggttgtcaagccatgccgaaccgctccacgagcagagacgcagcgcagacaacgcatagactaggatttccgtcatacggacctctacgtcgatactgacatgatatttcatttctaacattagcggccaaagctcggtttataaaccgagtgagataatgtgaagaacattgctgtatatccggggaggcggttattggaatgccgccaaccgtcgcctccccggtttgctag

SEQ ID NO: 1112 - RNA, 270 nt, Synthetic construct
  source 1..270: mol_type = other RNA
gctcatggcataggccctgaggtgcatcacaagctgtcaagccccaaggcggttccggaggaataacatcctacgattaccagcaatgcggccagcagcccacggagacttatcttcatagatactccaagtgtgacgctgacattatatgtcgatcctagcaatcgcggtgaggccgggtaaccggttagatggtgtgaagaacatttgggtttatccgaccgagcggctgaaggattgccgccatcctatgctcggtcggttggctcg

SEQ ID NO: 1113 - RNA, 270 nt, Synthetic construct
  source 1..270: mol_type = other RNA
gctcatggcatgggccctgaggtgcatcacaagctgtcaagccccaaggcggttccggaggaataacatcctacgattaccagcaatgcggccagcagcccacggagacttatcttcatagatactccaagtgtgacgctgacattatatgtcgatcctagcaatcgcggtgaggccgggtaaccggttagatggtgtgaagaacatttgggtttatccgaccgagcggctgaaggattgccgccatcctatgctcggtcggttggctcg

SEQ ID NO: 1114 - RNA, 276 nt, Synthetic construct
  source 1..276: mol_type = other RNA
gcttttgatagggataaatgaatcgttgatcaaaaggagcttaacaggttgtcaagtccaatcggcacgccaccaaggcaagctgagcagatagacagcaggaactggaacagggtcttcatagatacctccacggttatagttatagcataatccatttctaacatgacgcggctagagtttcaggactcgtggatggttgtcttaacaacttggttaagccgaggtaaggcgtaaggaattgccgcagttctaagtctgcctcggttttgctag

SEQ ID NO: 1115 - RNA, 314 nt, Synthetic construct
  source 1..314: mol_type = other RNA
gcctgtttagtttgagcgaacagggacttcagcagactgtcaaggtcaaggtaggcttggaaacttgccgccaaccaagacagggctatccacaggaaatgtatgatgattattgtcatattttcatccttgatagttattgtttgagtataactcatctttagcatatcacgcggtctcataaagttgtaagtcatgcatcattatgtaaacggtgctttttagaagtgctttgctatactaggggctgttaatttaattatctgaactgataattagggactaccgcaatcctaagctcctagttttgctaa

SEQ ID NO: 1116 - RNA, 238 nt, Synthetic construct
  source 1..238: mol_type = other RNA
tcggcatcgattgggatgccgcagttatgtgtttaaactgtcaaggctcgttgttaggccagtgcagattgcttgttccataatcggggctccttccgccagtgcgcagcgcatcttgtaggtaatccgacaataccagattgtcagctttactacagtatacactatcacgtcgtagacgaacgcacatcgcagaacggcgggggcgggaatgacaagggtaagtgcgttgacccga

SEQ ID NO: 1117 - RNA, 240 nt, Synthetic construct
  source 1..240: mol_type = other RNA
gcctcaggatgagttcgctggacttgagggggattggttaatggacgcaagaacgatgttcgcgaatgcgacgatcagcttgcaccagatcgcagagtgcccaatgggcatgatgaggtctccatgaccggccgtacgattgtacgccaagatgttaacaccgtggccggtgaaagccggaacatcatcgtaacagcagccggggggcgcgacgggttgaacggcacccacccccggcgc

SEQ ID NO: 1118 - RNA, 252 nt, Synthetic construct
  source 1..252: mol_type = other RNA
gcttcatgtgtaggcatgaaggtttgtaacagattgtcaatgtatttactcttggctagccaagagaaggtcatggataggaagcgtaaggttatcatcgtatagtctcctgtgattacataataaatcatttctaatagtttgcggtgcgtgcttcttagtgaagccagataattggtttgaccagttagttaaagcccaagaggatgctacggaaaggccgctcattccatttctcttgggttttgctag

SEQ ID NO: 1119 - RNA, 200 nt, Synthetic construct
  source 1..200: mol_type = other RNA
gactggaggcggcagagttttagttgaaactgtcaaggtttccgagaatatttataatgatgtccattaggatttccttatgatgacgacgatgccatatgcttgttagcatactgacaatatagacgattacatcgaagaagtgccttacacaccaaacggtgcggagcaaggttatgactataaaggcacatggtcac

SEQ ID NO: 1120 - RNA, 200 nt, Synthetic construct
  source 1..200: mol_type = other RNA
gactggaggcgtccgagctttagttgaaactgtcaaggtttccgagaatatttatgatgagatccattaggatttccttgtgatgacgacgatgccatatgctggacagcatactgacaatatagacgattacatcgaagaagtgccttacatcctaaacggtgcggagcaaggttatgactataagggcacatggtcac

SEQ ID NO: 1121 - RNA, 207 nt, Synthetic construct
  source 1..207: mol_type = other RNA
tctcacagatcggggggactggagcagctgttgaagctgtcaaggcttatgaaggtattcaatgcgagttccattgcgctctcctttgatatcggacgatgccagcagaatgcgcatagcatcctgatgacagtatagacgattacgtcgatgaagtgccttatctactaagcggtgcggggcaagggatttgaccataagggcaca

SEQ ID NO: 1122 - RNA, 232 nt, Synthetic construct
  source 1..232: mol_type = other RNA
gccgtatttaaggacggttcagtttcgtgttttcactgtcaaggcaaaatgtgtgactactgattgcgagtttcataatctgggctcctacggtaagccaccacggcgtcttgccagcatatcggagcaacatagttgccaccaatatgatagcatacacggcatggtcgaaaaaaacgcaaccgacaaaatagcgggggcggaaatgttaaaggttatgcgttagcctgat

SEQ ID NO: 1123 - RNA, 309 nt, Synthetic construct
  source 1..309: mol_type = other RNA
gcctcacacgaaaggtgtgggggaggaatattgttgtcaaccctttcttcataatttctgtcaggagactgcacaggagagcttgaagttggagtgactgactgggatcccaccagatggtggccgccgccagacacatccagaaggtagtgacacaagcttcccgctcaattataacatgattgagcattgcaaactgggcagtcggtttccttagacacacaccaaacgggtgaagcaggagactgcgtcaaactgtatatccgccgactgagggatgctgccccccgtgtcggcggatattgcaat

SEQ ID NO: 1124 - RNA, 291 nt, Synthetic construct
  source 1..291: mol_type = other RNA
gccctatttaataggaatggggggatatcacatgatgtcaaccagaataacctcccagtgatggatgattattccgatgacaatgctgtagatatgaatatgcttaatatgaatatttatggtaatacgcatctttagtcctccttgtgagactgaggtaatgatataataaatcatatgcaacatatggtggcacagcggttttatcgcaatgaatacgtaaagattacgtttgttaagccccaaacagtataggatggccacagtccgacctgtttggggttttgcatt

SEQ ID NO: 1125 - RNA, 292 nt, Synthetic construct
  source 1..292: mol_type = other RNA
gccccatttaataggaatggggggatatcacatgatgtcaaccagaataatcctccagttattggtgattattccgatgacaatgctgtagatatgaatatgcttaatatgaatatttatggtaatacgcatctttagtcctcctcgtgagactgaagcaatgatattatagatcatatgcaacatatggtggcacagcggttttatcgcaaagaatacgtaaaagattacgtttgttaagccccaaacagtataggatggccacagtccgacctgtttggggttttgcatt

SEQ ID NO: 1126 - RNA, 257 nt, Synthetic construct
  source 1..257: mol_type = other RNA
tggatcgttttggattcagagtttctattatagttgtcaactaagctataagcagaatatagcggcaatattaacaatatgttcatttggacctctaggttgatatgcaggtatgctatgcaatagctaagttgcgcgatgattgaaagaaatcgttcacaactatagtcattcgacttaatttgattgtcgtttagagttcgcaagagctcgcatttacagttggggggaagtacacattggatgcaaccattagc

SEQ ID NO: 1127 - RNA, 315 nt, Synthetic construct
  source 1..315: mol_type = other RNA
gctcatttcatcataggaaatgaggttgtcagcagactgtcaaggtcattataggcttcgaaagttgccatagaccatgacagtattatcaacaggaaacgcatggcatagattattgtcatgtttaactccttggtaattatatctgtttgattataattcatctttagcatattagcggtctgcgtaaaattgttgtcatgcaatagtatgcaaaatggtgctccttaactgagagtgcttggctatactgagggctgttaactacttaagtagttagggactaccgcaatcctaagcccttagttttgcttt

SEQ ID NO: 1128 - RNA, 284 nt, Synthetic construct
  source 1..284: mol_type = other RNA
gcctttgctgtagagcagggggcgtgtcacaagatgtcaacaccaaattgacagctaatcgctgccaacacggcatacgacatccgcgtggcgaggttacatttcattgtgatctccaacgtgatactgacattataaaccatgtctaacatgtgcggtttgcttgaggtttggcgacctgacaagattgctcgacttatagctagaaggtgtagtcaagtgcaccagctaagccaagcgaggggtaacggatgccgcagtcctacctcgcttggtttcgctag

SEQ ID NO: 1129 - RNA, 283 nt, Synthetic construct
  source 1..283: mol_type = other RNA
gcctttgctgtagagcagggggcgtgtcacaagatgtcaacaccaaactgacagctaattgctgccaacacggcatacgacatccgcgtggcgaggttacatttcattgtgatctccaacgtgatactgacattataaaccatgtctaacatgtgcggtttgcttgaggttggcgacctaacaagattgctcgacttatagctagagggtgtagtcaagtgcaccagctaagccaagcgaggggtaacggatgccgcagtcctacctcgcttggtttcgctag

SEQ ID NO: 1130 - RNA, 249 nt, Synthetic construct
  source 1..249: mol_type = other RNA
tcgcaggcggaaggcctgcgagttacgagttaagcctgtcaagtctcgccgcgaagatcaggttgatgatcgacaaggtcatctccatggtcggatcgacggaacatcctggcaggatggccgacaacccgatgagggttgcgcgtccagcgtactcgactgcgttgaattcggcactttagaggaacgatggtcctcgactagaaacggcaagggacgctggcatgacggtatgccgaaccctcgaac

SEQ ID NO: 1131 - RNA, 288 nt, Synthetic construct
  source 1..288: mol_type = other RNA
gccttcgtcattgggcggagggtgtgtcacaagctgtcaatacaaattggacctacgcagaatgcgataagttcaatgaagattgacacgatccagttggtgacttgcaatttcattgtgatttccactgtgatactgacattataacacatgtctaacatgcgcggttcgctgatcgctagtgggcaagcacgctaacgagaggcaagaaggtgtattaggttgcaccagttaagccaagcggggcaagaggatgccgcagtccaatgccccgcttggttttgctaa

SEQ ID NO: 1132 - RNA, 258 nt, Synthetic construct
  source 1..258: mol_type = other RNA
gctcaggtctttaggggctgaggtgtatcacaagctgtcaagggctacctgaaccatgaactggaacaggcgcttcttgaagctatgacaggcggttaatagactcatgtcgaacactcctgacactatgatattatacatcatacctgacattcgtggcccagcgcctcgcgctgagaatgcgtaataaaatacgtttgttaagcctagatcgggaattggaaggccacaatcccttaccgttctaggttttgcact

SEQ ID NO: 1133 - RNA, 243 nt, Synthetic construct
  source 1..243: mol_type = other RNA
tacgctcacgcgaacaggagtagtttgtttatactgtcaaccgctaaattcgcgctggtttggtacatagttgcctcgctggttagaatgaatgtggaaggatcggcaaagacgtaagtctcgatgatccatactgtttcagtatactcgaaatcgttcgaaaacggtcccagcagagtgttaatggcgctcgattgatagtggtgctgggggaggaacgcttccgaaaggaaaattccgtat

SEQ ID NO: 1134 - RNA, 267 nt, Synthetic construct
  source 1..267: mol_type = other RNA
gccttatgtgtaggcataagggaaatgtacaggttgtcaagccatgaacagcgtcctgcaaagctcgctgaccagacggtatacaacacttggaagatgctcataacggtctccatactactagtcacattatacagtgtttctaacatttgcggtgtggttcgtcgaatcattgacggatgagaaggttgggtaaagaccactttgttaagccgaggtgatgaagtattgaatggccgcagttcaaccatccctcggttttgcaat

SEQ ID NO: 1135 - RNA, 267 nt, Synthetic construct
  source 1..267: mol_type = other RNA
gccttatgtgtaggcataagggaaatgtacaggttgtcaagccatggacagcgtcctgcaaagctcgctgaccagatggtatacaacacttggaagatgctcataacgatctccatattactagtcacattatacagtgtttctaacatttgcggtgtggttcgtcgaatcattgacggatgagaaggttggataaagaccactttgttaagccgaggtgatgaagtattgaatggccgcagttcaaccatccctcggttttgcaat

SEQ ID NO: 1136 - RNA, 267 nt, Synthetic construct
  source 1..267: mol_type = other RNA
gccttatgtgtaggcataagggaaatgtacaggttgtcaagccatggacagcgtcctgcaaagctcgctgaccagacggtatacaacacttggaagatgctcataacggtctccatattactagtcacattatacagtgtttctaacatttgcggtgtggttcgtcgatgattcgacggatgagaaggttggataaaggccactttgttaagccgaggtgatgaagtattgaatggccgcagttcaaccatccctcggttttgcaat

SEQ ID NO: 1137 - RNA, 293 nt, Synthetic construct
  source 1..293: mol_type = other RNA
gcctcataaaagtagttatgagggaaattggtgaatttctgtcaagctttatctcaattgtaatcataatacttatccagtcaattacaatcgataacgcttctgaataacttggcatttggatacctccaatcgtcaaccaatttaatatactgattatagtataagctattagtgcattcagtagcctctttataggctagcaatggtctataattcgaaaggagagtatgctagcagggtttttgatagagtaataggctacgattacatacccctgctagctctgccaa

SEQ ID NO: 1138 - RNA, 280 nt, Synthetic construct
  source 1..280: mol_type = other RNA
gccctatgtgtaggcataggggtgatgtacagtttgtcaactcccggccagcgaccttcgctgaacaccgaccagaggctgaccaacaagtggacgatgctcataacggtctccatgatactgattacattatacagtgtttcaaacatttgcggtgaaatgcgcaattggattctgttgagttctttgtgtatgagaaggttggataaagaccactttgttaagccggggtgatgtttttttgaatgaccgcagttcgaaatcgccccggtttcacaat

SEQ ID NO: 1139 - RNA, 261 nt, Synthetic construct
  source 1..261: mol_type = other RNA
gcttacttatttaggaagtaaggtgtatcacaagctgtcaagtagaacgcgcaccagtacactggctagcagacgacttgcatggccgcagatggttagtagactcacgtcgaacactcctgcgatgatggtatcatatatcatatctgacattcgtggccgacatcatatcgatgttgtgaatgcgtatttaagtacgtttgttaagcccggatcgggaatcggatggccacagtcctttacctttccgggttttgcaat

SEQ ID NO: 1140 - RNA, 243 nt, Synthetic construct
  source 1..243: mol_type = other RNA
gccctaagaaattggtcttagggggctgtggtatcttttgtcaagtgcgtagatgctcataatggctatcagtataaatctgatccagtggcatccagtgagcacttctgctattaacatgatgattcttatcgtcatccagtagacctccttggtgacaatggttgcaatggctttcacaattatattgtactgccttttgtaaaggcgtggcccgcttgggaatgtggcggtagtacataa

SEQ ID NO: 1141 - RNA, 243 nt, Synthetic construct
  source 1..243: mol_type = other RNA
gccctaagaaattggtcttagggggctgtggtatcttttgtcaagtgcgtagatgctcataatggctatcagtataaatctgatccagtggcatccagtgagcacttctgctattaacatgatgattcttatcgtcatccagtagacctccttggtgacaatggttacaatggctttcacaattatattgtactgccttttgtaaaggcgtggcccgcttgggaatgtggcggtagtacataa

SEQ ID NO: 1142 - RNA, 279 nt, Synthetic construct; identical to SEQ ID NO: 828
  source 1..279: mol_type = other RNA

SEQ ID NO: 1143 - RNA, 281 nt, Synthetic construct
  source 1..281: mol_type = other RNA
gcttcgggtatagacccgaaggtgcatcacaagctgtcaagccccaaggcggcatcccaggtgtaacaacccagggtgactagcaatgcggccagcagccctcggatacttatcttcataggtactccaagtgtgacgctgacactatacgtcgatcctagcaatcgcggcgaaatcggagctgggtgaccaacaccgattggatgatgtgaggagcatttgagtttatccggccaggcggctgaggattgccgccatcctatgcctggccggttggctcg

SEQ ID NO: 1144 - RNA, 281 nt, Synthetic construct
  source 1..281: mol_type = other RNA
gcttcgggtatagacccgaaggtgcatcacaagctgtcaagccccaaggcggcatcccaggtgtaacaacccagggtgaccagcaatgcggccagcagccctcggatacttatcttcataggtactccaagtgtgacgctgacactatacgtcgatcctagcaatcgcggcgaaatcggaactgggtgaccaacaccgattggatgatgtgaggagcatttgagtttatccggccaggcggctgaggattgccgccatcctatgcctggccggttggctcg

SEQ ID NO: 1145 - RNA, 288 nt, Synthetic construct
  source 1..288: mol_type = other RNA
gcttctgaatgaggatatttatttaaaccaattaggtcagaaggtaaataacatgttgtcaagtactatctggacgccgaataagcttaacgataggaacgataacaacatctcgacgaaggttatcctaagtttcatagatgtctccaaggttatagttacattataattcatatctaacattacgcggcaacgtcttaggacaaaacggttgtttaaacaacttggttaagccggagtagggcgtgtggaattgccgcagttctaagtctgctccggttttgctaa

SEQ ID NO: 1146 - RNA, 268 nt, Synthetic construct
  source 1..268: mol_type = other RNA
gtttgaaccaattaggtcagaaggtaaataacatgttgtcaagtactatcggaacgcctaataagcttaacgatagaaaccataacaacatctcgacgaagcttatcctaagtttcatagatgtctccaaggttatagttacattataattcatatctaacattacgcggcaacgtcttaggacaaaacggttgttcaaacaacttggttaagccggagtaggacgtgtggaattgccgcagttctaagtctgctcaggttttgctaa

SEQ ID NO: 1147 - RNA, 283 nt, Synthetic construct
  source 1..283: mol_type = other RNA
gctttggatatagatccaaaggtgcatcacaagctgtcaagtcctatcgcggcaccacaggtgaaataacccagggtgaccagcagtgcggacagcagcgctcggatacttattctcataggtactccaagtgtgacgctgacattatacgtcgatcctagcaatcgcggcgaaatcggatctgggtgactgagaccgattggatgatgtaaagagcattttggtttatccggccaggcggcttagaggattgccgccatcctaagcctggccggttggctaa

SEQ ID NO: 1148 - RNA, 301 nt, Synthetic construct
  source 1..301: mol_type = other RNA
gcctcataaaagtagttatgagggaaattggtgaatttctgtcaagctttatctcaattgtaatcataatacttacccagtcgattacaatcgataacgcttctgaataacttggcatttggatacctccaatcgtcataaacaaccaatttaatatactgattatagtatgagctattagtgcattcagtagcctctttataggctagcaatggtctataattcgaaaggagagtatgctagcagggtttttgatagagagtaataggctacgattacatacccctgctagctctgccaa

SEQ ID NO: 1149 - RNA, 284 nt, Synthetic construct
  source 1..284: mol_type = other RNA
atcgtatttaattgggaatacgagtgcaaggtttgatgttgtcaagcagatagtcgcacgattgttcgattactatgctaaatagtaagattacaattctcatgtcgatatcgttaggcattctacaatcaactcctacgctaatcattataagatgattatataataattgtttatttatgggtccttctgtctttgtattagacaaaagtcagatgagtattttgtatgctagggaggtcactgttaatagacccaggttactacctccccagctctgcaaa

SEQ ID NO: 1150 - RNA, 282 nt, Synthetic construct
  source 1..282: mol_type = other RNA
gcttcgggtatagacccgaaggtgcatcacaagctgtcaagccccaaggcggcatcccaggtataacaacccaggttgaccagcaatgcggccagcagccctcggatacttatcttcataggtactccaaatgtgacgctgacactatacgtcgatcctagcaatcgcggcgaaatcggaactgggtgactgagaccgattggataatgtgaggaacatttgggtttatccggccaggcggcttgaggattgccgccatcctaagcctggccggttggctcg

SEQ ID NO: 1151 - RNA, 281 nt, Synthetic construct
  source 1..281: mol_type = other RNA
gctttggatatagatccaaaggtgcatcacaagctgtcaagccccatggcggcatcccaggtataacaaccaaaggtgaccagcaatgcggccagcagccctcggatacttatcttcataggtactccaagtgtgacgctgacattatacgtcgatcctagcaatcgcggcgaaatcggaactgggtgacagagaccgattggatgatgtgaggagcatttgagtttatccggccaggcggctgaggattgccgccatcctatgcctggccggttggctcg

SEQ ID NO: 1152 - RNA, 292 nt, Synthetic construct
  source 1..292: mol_type = other RNA
gcctcataaaagtagttatgagggaaattggtgaatttctgtcaagctttatctcaattgtaatcataatacttatccagtcaattacaattgataacgcttctgaataacttggcatttggatacctccaatcgtcaaccaatttaatatactgattatagtataagctattagtgcattcagtagcctctttataggctagcaatggtctataattcgaaaggagagtatgctagcagggttttgatagagtaataggctacgattacatacccctgctagctctgccaa

SEQ ID NO: 1153 - RNA, 301 nt, Synthetic construct
  source 1..301: mol_type = other RNA
gcctcataaaagtagttatgagggaaattggtgaatttctgtcaagctttatctcaattgtaatcacaaggctgacccagctaattacaatcgataatgcttctgaataacttggcatttggatacctccaatcgtcataatcaaccaattcaatatactaattatagtataagctattagtgcatttagtagcctctttataggctagcgatggtctataatttgaaaggagagtatgcttgcaagggttctttgatagagtaataggctacgattacatacccttgctagctctgccaa

SEQ ID NO: 1154 - RNA, 330 nt, Synthetic construct
  source 1..330: mol_type = other RNA
gttctgtgaaaatagttgcagaagtataaagtttcacgcttgtcaaggttataaatatttagaacctcaacaagcaaactagtaacttctatcaagaacagcactagctggacttctagattgctagacaaacttagcaacattgtaattacctccatagggtgagtatagtgtaatgttttaagagtaagaattccgttatatgcgggagcgcgtggtcagcagagcattcatctacggatggatgacaccaaattaggctaggaggttttctgttatgaaatggagtaatgggccactacaattacataacctctctagctcttctaa

SEQ ID NO: 1155 - RNA, 282 nt, Synthetic construct
  source 1..282: mol_type = other RNA
gcttcgggtatagacccgaaggtgcatcacaagctgtcaagccccaaggcggcatcccaggtgtaacaacccaggttgaccagcaatgcggccagcagccctcggatacttatcttcataggtactccaaatgtgacgctgacactatacgtcgatcctagcaatcgcggcgaaatcggaactgggtgactgagaccgattggataatgtgaggaacatttgggtttatccggccaggcggcttgaggattgccgccatcctaagcctggccggttggctcg

SEQ ID NO: 1156 - RNA, 302 nt, Synthetic construct
  source 1..302: mol_type = other RNA
gcctcataaaagaagttatgagggtaattggtgaatttctgtcaagctttatctcaattgtaattccactgctaatcaagctaattacaaatgatattgcttctgaataactgggcatttggatacctccaatcgtcataatcaaccaattcaatatactaattatagtataagctaatagtgcatctagtagtctctttatagtctagcaatagcctataattcgaaaggagagtatgcttgcaagggtttcttttaaagagtaatagactacgattacatacccttgctagctctgccaa

SEQ ID NO: 1157 - RNA, 280 nt, Synthetic construct
  source 1..280: mol_type = other RNA
gcttttgttaacaaatcataatttgttgaacaaaaggaacgttacaagttgtcaagcacaatcagcaagccaataaggcaggccgaccaacaagacgactggacatgatggaatagggtcttcacagatacctccacggttatagtaatagtataatccatttctaacattacgcggctaagagtcttatgactcatggatggttgtttaaacaacttggttaagccgaggtaaggcgtattgaattgccgcagttctaagtctgcctcggttttgctag

SEQ ID NO: 1158 - RNA, 266 nt, Synthetic construct
  source 1..266: mol_type = other RNA
acctaagcaattgtgcttagggatatgtactgaatgtcaagtgttacgcatcccggcgaaacgccgagaaacaatgcgaataccggcaaacaaggtagtattatgtgtaatagcatgtgcttgtccttaatgtaagtatataacatttcaaacttcaggtgactgcagttttctgtgatgtgatttaatcatcacgtgttatagccgatataacgtctctgtatagagtagaccgtcaccatctaaagttatatcggtttagcaga

SEQ ID NO: 1159 - RNA, 258 nt, Synthetic construct
  source 1..258: mol_type = other RNA
gctttaagtaattgattaaaaggaacttaacaggttgtcaagtctaatcggaaagccaagcaagctaactgagaagaatgacagcaatacattgaatagagtcgtcacagatgtctccaaagttatagttacagtataattcatatctaacatgacgtggctgagtcttcgggcttgatggttgtcttaacaacttggttaagccggggtaaggcgtagggaattgccacagttctaagtctgcctcggttttgctag

SEQ ID NO: 1160 - RNA, 254 nt, Synthetic construct
  source 1..254: mol_type = other RNA
gctttacaagtatgttgtaaaggaatggtattgttgtcaacagttctaacaaacatttataagaaatggtttgaggctgtctgatactggtcaccgtgaccagaattaagattgtaatgaacatgacgataatctcctgcttagttgtaattataccgcaattaagtattgcagttaattggatagctggcaatcaaaaataaaggcatgcctttcatatgattactaagttttttcgtatacccatcggctaa

SEQ ID NO: 1161 - RNA, 227 nt, Synthetic construct
  source 1..227: mol_type = other RNA
gctcactaggggggcggagctgaccttgaagttgtcaagccccaaggcgaccagcagtcgaacgagtatcattacgatctccaagattagcgggacgttgaaggtgcgggccgcgaaagctgccgcacaactaatatagtcaatatcctcgactaggtgccatcagagctacgtcggctcgtcttgaacagtgtggggtaggagcgatgccggaagcacacggcgct

SEQ ID NO: 1162 - RNA, 247 nt, Synthetic construct
  source 1..247: mol_type = other RNA
gcttttaataattgtttcataattgattaaaaggtgctgaacaggctgtcaaacctactcaataagcttattgagcagaatgacagcaatacatggataagtgtcttcatagatgcctccagagttattgttatagtgatagcataatttatatttaacatgacgcggcttttgacggctgtaatggccagttaatccgaggatgcgtttagaattgccgctgttctagcttcctcggttttgctct

SEQ ID NO: 1163 - RNA, 330 nt, Synthetic construct
  source 1..330: mol_type = other RNA
gttctgtgaaaatagttgcagaagtgttaagtttcacgcttgtcaaggttataaatatttagaacctcaacaagcaaactagtaacttctatcaagaacagcactagctggatttctagattgctagacaaacttagcaacattgtaattacctccatagggtgagtatagtgtaatgttttaagagtaagaattccgttatatgcgggagggcgtggtcagcagagcattcatctacggatggatgacaccaaattaggctaggaggttttctgttatgaaatggagtaatgggccacaacaattacataacctctctagctcttctaa

SEQ ID NO: 1164 - RNA, 302 nt, Synthetic construct
  source 1..302: mol_type = other RNA
gcctcataaaaatagttatgagggaaattggtgaatttctgtcaagctttatctcaattgtaatcacttggttaaccaagctaattattatcgataacgctgctgaataacttggcatttggatacctccaatcgtcataatcaaccaaatcaatatactaattatagtagaatctattagtaaatttagtagcctctttataggctagcaatggtctataattcgaaaggagagtatgcttgcaagggtttctttaatagagtaataggctacgattacatacccttgctagctctgccaa

SEQ ID NO: 1165 - RNA, 238 nt, Synthetic construct
  source 1..238: mol_type = other RNA
tcgggaccgaaagggtttcgcagttacgtgtttctactgtcaaggcatgtcgcgatgtccaggcaatgcgcgagtttcacaattcgggctcctcgtgccagatatcggtccggcataccggcattgcggcaataccagattgccagcacgaccacagtatacacggccacgtcgaaagatagcgcaccccacaaaacggcgggggcggagatgctaagggcaagtgcgttggcccaat

SEQ ID NO: 1166 - RNA, 282 nt, Synthetic construct
  source 1..282: mol_type = other RNA
gctttggatatagatccaaaggtgcatcacaagctgtcaagccccaaggcggcatcccaggtgtaacaacccagggtgaccagcaatgcggccagcagccctcggatacttatcttcataggtactccaaatgtgacgctgacactatacgtcgatcctagcaatcgcggcgaaatcggcactgggtaactgaggccgattggataatgtgaggaacatttgggtttatccggccaggcggcttgaggattgccgccatcctaagcctggccggttggctcg

SEQ ID NO: 1167 - RNA, 236 nt, Synthetic construct
  source 1..236: mol_type = other RNA
gccgaattggcggcaaccagtttcgtgtttatactgtcaaggccaaattcgaggtctgagcagattgcgagttccaccatatgggctcccttcgccagccacgcgggcggctttgcggcagttcggcaataccagattgccagttgcctcgcagtatacacgagcacgtcgatgacgaagcgcacaccgcagaacggcgggggcggaggtgttaagggctagtgcgttggcccgat

SEQ ID NO: 1168 - RNA, 247 nt, Synthetic construct
  source 1..247: mol_type = other RNA
gctttcaatagttactaacgtgattgattgaaaggtgctgaacaggctgtcaaacctactcaataagctaattgagcagaatgacagcaatacttggataagtgtcttgataggtacctccagagttattgttatagtgatagcataatttatgtttaacatgacgcggctttgacggcccctacggccagttaatccgaggaagcatttagaattgccgctgttctagctccctcggttttgctct

SEQ ID NO: 1169 - RNA, 247 nt, Synthetic construct
  source 1..247: mol_type = other RNA
gctttcaatagttgctaacgtgattgattgaaaggtgctgaacaggctgtcaaacctactcaataagctaattgagcagaatgacagcaatacttggataagtgtcttgataggtacctccagagttattgttatagtgatagcataatttatgtttaacatgacgcggctttgacggcccctacggccagttaatccgaggaagcatttagaattgccgctgttctagctccctcggttttgctct

SEQ ID NO: 1170 - RNA, 280 nt, Synthetic construct
  source 1..280: mol_type = other RNA
gcttcgggtatagacccgaaggtgcatcacaagctgtcaagccccaaggcggcatcccaggtgaaaccacccagggtgaccatcagtgcggccagcagcgctcggatacttatcttcataggtactccaagtgtgacgctgacattatacgtcgatcctagcaatcgcggcgaaatcggacagggtaaccaacaccgattggatgatgtgaggagcatttgagtttatccggccaggcggctgaggattgccgccatcctatgcctggccggttggctca

SEQ ID NO: 1171 - RNA, 247 nt, Synthetic construct
  source 1..247: mol_type = other RNA
gctttcaatagttactaacgtgattgattgaaaggtgctgaacaggctgtcaaacctactcaataagctaattgagcagaatgacagcaatacttggataagtgtcttgataggtacctccagagttattgttatagtgatagcataatttatgtttaacatgacgcggctttgacggcctttatggccagttaatccgaggaagcatttagaattgccgctgttctagctccctcggttttgctct

SEQ ID NO: 1172 - RNA, 274 nt, Synthetic construct
  source 1..274: mol_type = other RNA
gcttttgatagcgacttgagtcgttgatcaaaaggtgtataacaggttgtcaagttctatagggacgccaataaggctaactgagacgaaccacgacaggaactggaatagggtcttcatagatacctccacggtgatagttatatcgtaactcatttctaacatgacgcggctagggttttcgaactcttagatggttgttttaacaacttagttaagccgaggtaagacgtaaggaattgccgcagttctaagtctgcctcggttttgctag

SEQ ID NO: 1173 - RNA, 235 nt, Synthetic construct
  source 1..235: mol_type = other RNA
tcgtcgtctttagggcggcgcagtcgatcgtttaaactgtcaagtcctgtggccaggtacatgcagatttcgagtaccatttgttgggctcctgtatttataccggcgacgcggcttcggtttccggtaatcccggttgttatgtaaatgacaatataagcgaacacgtcgaaaagatgggcaccacgcagaacagtcggggccggaacgaataagggcaagtgtcctgcctaat

SEQ ID NO: 1174 - RNA, 206 nt, Synthetic construct
  source 1..206: mol_type = other RNA
gccttatagaaatagctataagggtttacgtatctatgtcaagaatattcttgaacagaattaatagcatacagttgatgatattaagaattatattgtccattgtatgacctcctattaccagtgaattaaagtagctgttaataatattatacaatacatcgtatttggaggatggtagagttccttgcgaaagcaaggtccaa

SEQ ID NO: 1175 - RNA, 301 nt, Synthetic construct
  source 1..301: mol_type = other RNA
gcctcataaaagtagttatgagggaaattggtgaatttctgtcaagctttatctcaattgtaatcataatacttacccagtcgattacaatcgataacgcttctgaataacttggcatttggatacctccaatcgtcataaacaaccaatttaatatactgattatagtataagctattagtgcattcagtagcctctttataggctagcaatggtctataattcgaaaggagagtatgctagcagggtttttgatagagagtaataggctacgattacatacccctgctagctctgccaa

SEQ ID NO: 1176 - RNA, 301 nt, Synthetic construct
  source 1..301: mol_type = other RNA
gcctcataaaagtagttatgagggaaattggtgaatttctgtcaagctttatctcaattataatcataatacttacccagtcgattacaatcgataacgcttctgaataacttggcatttggatacctccaatcgtcataaacaaccaatttaatatactgattatagtataagctattagtgcattcagtagcctctttataggctagcaatggtctataattcgaaaggagagtatgctagcagggtttttgatagagagtaataggctacgattacatacccctgctagctctgccaa

SEQ ID NO: 1177 - RNA, 247 nt, Synthetic construct
  source 1..247: mol_type = other RNA
gcttttaataattgttttataattgattaaaaggtgctgaacaggctgtcaaacctactcaataagcttattgagcagaatgacagcaatacatggataagtgtcttcatagatgcctccagagttattgttatagtgatagcataatttatatttaacatgacgcggcttttgacggctgtaatggccagttaatccgaggatgcgtttagaattgccgctgttctagcttcctcggttttgctct

SEQ ID NO: 1178 - RNA, 247 nt, Synthetic construct
  source 1..247: mol_type = other RNA
gctttcaatagtcgctaacgtgattgattgaaaggtgctgaacaggctgtcaaacctactcaataagctaattgagcagaatgacagcaatacttggataagtgtcttgataggtacctccagagttattgttatagtgatagcataatttatgtttaacatgacgcggctttgacggcctctatggccagttaatccgaggaagcatttagaattgccgctgttctagctccctcggttttgctct

SEQ ID NO: 1179 - RNA, 280 nt, Synthetic construct
  source 1..280: mol_type = other RNA
gcttcgggtatagatccgaaggtgcatcacaagctgtcaagccccaaggcggcatcccaggtgaaaccacccaaggtgaccagcagtgcggccagcagcgctcggatacttatcttcataggtactccaagtgtgacgctgacattatacgtcgatcctagcaatcgcggcgaaatcggactgggtgaccaacaccgattggatgatgtgaggagcatttgagtttatccggccaggcggttgaggattgccgccatcctatgcctggccggttggctcg

SEQ ID NO: 1180 - RNA, 271 nt, Synthetic construct
  source 1..271: mol_type = other RNA
gcttagtgtatttgatgctaaggaacattacaggttgtcaagtcctatttgcggaatcccaagggaaaccaaagataagattgataacaatatctggaacagggtcttcatagatacctccaaggtaatagtaatagtataattcatttctaacagacgcggcgaggctcgctttttaagtgggtgagaaggttggagaaagaccacttggttaagccggagttaggcgttaagaatggccgcatttcatagccagctccggttttgctag

SEQ ID NO: 1181 - RNA, 257 nt, Synthetic construct
  source 1..257: mol_type = other RNA
tcccaaacgaaagtgcgggagtagttagtttataccgtcaacatctaaattcgccgtggtgtagtgcataatcgcctcgctcgtgtggatgaaggttgaaggatcggcaaagacgcgagtctcgatgatccatactgtgacagtatactcgatatcgttcgaaaacgtcccaccagagtgttatcggcgctcgacagataatggtgctgggggaagaacacttccgataggaaaattccgcatgggacgcggatgtt

SEQ ID NO: 1182 - RNA, 280 nt, Synthetic construct
  source 1..280: mol_type = other RNA
gcttcgagatgaggagaacactccaattaggctcggaggtttataacatgttgtcaagtactatcggaacgccacaacaggcaaacgataagaacgataagattacatggactaaggtcttctgaatgtttatggatacctccaagttaatagttatattataattcatgtctaacattacgcggcgacgttttacaagatggttacttaagtaacttggttaagccgaggtaaggcgattggaattgccgcagttctaagtctgcctcggttttgctag

SEQ ID NO: 1183 - RNA, 278 nt, Synthetic construct
  source 1..278: mol_type = other RNA
gcttttgaatgaggtttaaccaatagttcaagaggtatataacagtttgtcaagtactatcggtaagccaaacaaggctaatgataagaacgataacaacaactggactaatatgttctcaatgttcatagatacctccatggttatagttatattataattcatgtctaacatcacgcggctacgtctaaagacaaaacggttgctcagcaacttggttaagccggagtagggcgaatggaattgccgcagttctaagtccgctccggttttgctaa

SEQ ID NO: 1184 - RNA, 302 nt, Synthetic construct
  source 1..302: mol_type = other RNA
gcctcataaaagtagttatgagggaaattggtgaatttctgtcaagctttatctcaattgtaatcacaaggctgccccagctaattacaatcgataacgcttctgaataacttggcatttggactcctccaatcgtcataatcaaccaattcaatatactaattatagtataagctattagtgcatttagtagcctctttatagactagcaatggtctataattcgaaaggagagtatgcttgcaagggtttctttgatagagtaataggctgcgattacatacccttgctagctctgccaa

SEQ ID NO: 1185 - RNA, 235 nt, Synthetic construct
  source 1..235: mol_type = other RNA
gatccgttcgggggagccggagtgacggttgaaactgtcaaggctgaagtttgcaatgatattgatcgccatcagaatggtgaactccgtatcggcgcaggcgcagtcgcgccgggtgcgtagcatctggacgacagtatagactacaaagtcgattgtttgcgggtaagagtcttcgagtggactcgctgctaacggtgcagggtgaggtcataaccggaccgcaactggttac

SEQ ID NO: 1186 - RNA, 276 nt, Synthetic construct
  source 1..276: mol_type = other RNA
gctttggatacagatccaaaggtgcatcacaagctgtcaagccataaagctgcatccccggtataaccacttaagatgaccagcaatgcggctaccagccctcggatacttatcttcataggtactcccagtgtgacgctgacatgatacgtcgatcctagcaatagcggcgaagtcggggtggtccacaccgattggatgatgtgaggagcatttgagtttatccggccaggcggcttcggattgccgccatcctgtgcctggccggttggctcg

SEQ ID NO: 1187 - RNA, 238 nt, Synthetic construct
  source 1..238: mol_type = other RNA
gcgcccaattgggggcgttccagtcacgtgtttaaactgtcaaggccagtttcgcagccggtgcaagacgcgagttcgatcattcgggctcctctcgccagccacgcgggcggctttgcggcaatcaggcaataccacattgccaggtgcttcacagtatacacgaccacgtcgaagacgaacgcacaccgcagaacggcgggggcggagatgttaagggtcggtgcgttgacccgat

SEQ ID NO: 1188 - RNA, 281 nt, Synthetic construct
  source 1..281: mol_type = other RNA
gctttggatatagatccaaaggtgcatcacaagctgtcaagccccaaggcggcatcccaggtgtaacagcccagggtgaccagcaatgcggccagcagccctcggatacttatactcataggtactccaaatgtgacgctgacactatacgtcgatcctagcaatcgcggcgaaatcggaactgggtgactgagtccgattggatgatgtgaggagcatttgagtttatccggccaggcggctgaggattgccgccatcctatgcctggccggttggctcg

SEQ ID NO: 1189 - RNA, 268 nt, Synthetic construct
  source 1..268: mol_type = other RNA
gtttgaaccaattaggtcagaaggtaaataacatgttgtcaagtactatcggaacgcctaataagcttaacgatagaaaccataacaacatctcgacgaagcttatcctaagtttcatagatgtctccaaggttatagttacattataattcatatctaacattacgcggcaacgtcttaggacaaaacggttgttcaaacaacttggttaagccggagtaggacgtgtggaattgccgcagttctaagtctgctccggttttgctaa

SEQ ID NO: 1190 - RNA, 282 nt, Synthetic construct
  source 1..282: mol_type = other RNA
gcttcgggtgtagacccgaaggtgcatcacaagctgtcaagccccaaggcggcatcccaggtgtaacaacccaggttgaccagcaatgcggccagcagccctcggatacttatcttcataggtactccaaatgtgacgctgacactatacgtcgatcctagcaatcgcggcgaaatcggaactgggtgactgagaccgattggataatgtgaggaacatttgggtttatccggccaggcggcttgaggattgccgccatcctaagcctggccggttggctcg

SEQ ID NO: 1191 - RNA, 263 nt, Synthetic construct
  source 1..263: mol_type = other RNA
gtttaccaattaggctcaaaggcttataacatgttgtcaagtactatcggaacgccaaacaaggccaacgatacgaacgataagaacacatggactaaggttgtcttaatacaaatagatgcctcctggttaatagttatattataattcatgtctaacattacgcggctacgtatttcaagatggttactttagtaacttggttaagccgaggtaaggcgattggaattgccgcagttctaagtctgcctcggttttgctag

SEQ ID NO: 1192 - RNA, 282 nt, Synthetic construct
  source 1..282: mol_type = other RNA
gcttctggtatagacccgaaggtgcatcacaagctgtcaagccccaaggcggcatcccaggtgtaactacccagggtgaccagcaatgcggccagcagccctcggatacttatcttcataggtactccaaatgtgacgctgacactatacgtcgatcctagcaatcgcggcgaaatcgggactgggtgactgagaccgattggataatgtgaggaacatttgggtttatccggccaggcggcttgaggactgccgccatcctaagcctggccggttggctca

SEQ ID NO: 1193 - RNA, 282 nt, Synthetic construct
  source 1..282: mol_type = other RNA
gctttggatatagatccaaaggtgcatcacaagctgtcaagccccaaggcggcatcccaggtgtaacaacccaaggtgaccagcagtgcggccagcagccctcggatacttatcttcataggtactccaagtgtgacgctgacatgatacgtcaatcctagcaatcgcggcgaaatcggaactgggtgactgagaccgattggataatgtgaggagcatttgagtttatccggctaggcggcttgaggattgccgccatcctaagcctggccggttggctcg

SEQ ID NO: 1194 - RNA, 263 nt, Synthetic construct
  source 1..263: mol_type = other RNA
gtttaccaattaggctcaaaggcttataacatgttgtcaagtactatcggaacgccaaacaaggccaacgatacgaacgataagaacacatggactaaggttgtcttaatacaaatagatgcctcctggttaatagttatattataattcatgtctaacattacgcggctacgtatttcaagatggttacttgagtaacttggttaagccgaggtaaggcgattggaattgccgcagttctaagtctgcctcggttttgctag

SEQ ID NO: 1195 - RNA, 276 nt, Synthetic construct
  source 1..276: mol_type = other RNA
gcttttgataggggcaaataagtcgctgatcaagaggagcataacaggttgtcaagtccaatcggcaagccaccaaggcaagctgagcaggtaggcagcaagaactggaacagggtcttcatagatacctccacggttatagttatagcataatccatttctaacatgacgcggctagagctcttgggctcatagatggttgttttaacaacttggttaagccgaggtaagacgagaggaattgccgcagttctaagtctgcctcggttttgctag

SEQ ID NO: 1196 - RNA, 264 nt, Synthetic construct
  source 1..264: mol_type = other RNA
gcctggtggctaggacgccagggaaaatcacaggatgtcaagccatgccaggccgccaatacggcagcccgacacgattgacacccacgttgcgatggtcgtcctcatggatacctccaatgtgatgctgacattatacgtcattgctaatagaagcggcggggcccgggtttcctgggtgagatggtgagataaggtccacttggttaagccgggggaggattacggacagccgcagtcctatgccttccccggttttgctag

SEQ ID NO: 1197 - RNA, 281 nt, Synthetic construct
  source 1..281: mol_type = other RNA
gcttcgggtatagacctgaaggtgcatcacaagctgtcaagccccaaggcggcatcccaagtgtaacaacccaagatgaccagcaatgcggccagcagccctcggatagttatcttcatagatactccaagtgtgacgctgacattatacgtcgatcctagcaatcgcggcgaaatcggaaatgggtgaccaacaccgattggatgatgtgaggagcatttgagtttatccggccaggcggctgaggattgccgccatcctatgcctggccggttggctcg

SEQ ID NO: 1198 - RNA, 293 nt, Synthetic construct
  source 1..293: mol_type = other RNA
gcctcataaaagtagttatgagggaaattggtgaatttctgtcaagctttatctcaattgtaatcataatacttatccagtcaattacaatcgataacgcttctgaataacttggcatttggatacctccaatcgtcaaccaatttaatatactgattatagtataagctattagtgcattaagtagcctctttataggctagcaaaggtctataattcgaaaggagagtatgctagcagggtttttgatagagtaataggctacgattacatacccctgctagctctgccaa

SEQ ID NO: 1199 - RNA, 276 nt, Synthetic construct
  source 1..276: mol_type = other RNA
gcttctggtatcagcctgatggtttttgatcagaaggaactgtacaggttgtcaagtatgaccggcaaaccagtaaggtaagctgagcagaacgataacaatacatggaacagggtcctcacggatacctccacggttatagtaacagtataatccatttctaacatgacgcggcgtagaaccttcgggttcgtgaaggttgttttaacaacttgtctaagccgaggtagagtgtaaggaattgccgcagttctaagctcgcctcggttttgctaa

SEQ ID NO: 1200 - RNA, 276 nt, Synthetic construct
  source 1..276: mol_type = other RNA
gcttttgatagggacaaataagtcgttgatcaaaaggagcttaacaggctgtcaagtccaatcggtatgcccacaaggcaagctgagcagatagacagcaggaactggaatagggtcttcatagatacctccacggttatagttacagtataatccatttctaacatgacgcggctagagcctacgggctcgtggatggttgttttaacaacttggttaagccgaggtaaggcgtaaggaattgccgcagttctaagtctgcctcggttttgctag

SEQ ID NO: 1201 - RNA, 281 nt, Synthetic construct
  source 1..281: mol_type = other RNA
gccctaaacaaaggtttaggggtattgtacaggttgtcaagcctcccacagttcttggtgaacccaatcactgtgacgacggtaagcaacacttggatgatattcataattgactccacgctactgattacattatacagcatatctaacatttgcggcgaggttcacaatttgtatttaggtactgattgtggatgagaaggttggagaaagaccacttggttaagccggaggatgtgtcctagaattgtcgctattctgtcatcctccggttttgctaa

SEQ ID NO: 1202 - RNA, 261 nt, Synthetic construct
  source 1..261: mol_type = other RNA
gcttacttatttaggaagtaaggtgtatcacaagctgtcaagtagaacgctcaccagtacactggctagcagacgacttgcatggccgcagatggctagtagactcacgtcgaacactcctgcgatgatggtatcatatatcatatctgacattcgtggccgacatcatatcgatgttgtgaatgcgtatttaagtacgtttgttaagcccggattgggaatcggatggccacagtcctttacctttccgggttttgcaat

SEQ ID NO: 1203 - RNA, 279 nt, Synthetic construct
  source 1..279: mol_type = other RNA
gccctaagcgtaaggcttaggggtgatgtacagtttgtcaactctcggacagcgaccttcgctgaatacctcccagaggctgattaacaggtggacgatgctcataacggtctccatgatactgattacattatacagtgtttctaacatttgcggtgaaatgcacttagcctacttgtagtgctatgtgtatgagaaggttggataaagaccactttgttaagccggggcaatgtttttctgaacgaccgcagttcgaaattgccccggtttcacaat

SEQ ID NO: 1204 - RNA, 276 nt, Synthetic construct
  source 1..276: mol_type = other RNA
gctttaggtgtagtcctaaaggatatgtacaggttgtcaataccagccatggctcccacaatggtcgccaatgcgtggattgacgagactaatcgaatcataacggttacgctctccaagatgctgatgacattatatatcatctctaacacttgcggtgtggtccatatcggttaggtttgatgtggatgagaaggtcggataaaggccactaagttaagccgaggaagtgagtttgtgaagtgccgcgattcaatcactcctcggttttgctaa

SEQ ID NO: 1205 - RNA, 280 nt, Synthetic construct
  source 1..280: mol_type = other RNA
gccctatgtgtaggcataggggtgatgtacagtttgtcaactcccggccagcgaccttcgctgaacaccgaccagaggctgaccaacaagtggacgatgctcataacggtctccatgatactgattacattatacagtgtttcaaacatttgcggtgaaatgcgcaattggattctgttgagttctttgtgtatgagaaggttggagaaagaccactttgttaagccggggtgatgtttttttgaatgaccgcagttcgaaatcgccccggtttcacaat

SEQ ID NO: 1206 - RNA, 257 nt, Synthetic construct
  source 1..257: mol_type = other RNA
gctccatgcaaaggtatggagggacttcacatgatgtcaagcccgccgaagcccgcaacatggcacgacagcgagattgatagcacagtctggacgattagcttcataattgcctccatgactacatggtaatacatttctaacatacgtggctcggcctgacttagtcgggtgaaatagttggagaaagaccgctggcctaatccggacgggtggctcatagattgccaccatctttcacctgtccggtttgctag

SEQ ID NO: 1207 - RNA, 258 nt, Synthetic construct
  source 1..258: mol_type = other RNA
gctcagttttttagggactgaggtgtatcacaagctgtcaagggctacctgaaccatgaactggaacaggcgcttcttgaagctacagcaggcggttaatagactcacgtcgaacactcctgacactatgatattatacatcataactgacattcgtggcccagcgcctagcgctgtgaatgcgtaataaaatacgtttgttaagcctggatcgggaattggaaggccacaatcccttacctttccaggttttgcact

SEQ ID NO: 1208 - RNA, 254 nt, Synthetic construct
  source 1..254: mol_type = other RNA
ttagcttaagcgacgggagtagttagtttataccgtcaacagctaatttcaggtcggtcgggtgcatagtcgcctcgctcgcttggatgaaggttgaggtgtcagccgggacgtgagtctcgacgatacacactgtgacagtatactcgatttcgttcgaaaacgtcccaatagagtgtaatcgacgctcgatagacagcagtgctgggggaagaacctttccgtaaggaatattccgcatggggcgcggatgt

SEQ ID NO: 1209 - RNA, 293 nt, Synthetic construct
  source 1..293: mol_type = other RNA
gcctcataaaagtagttatgagggaaattagtgaatttctgtcaagctttatctcaattgtaatcataatacttatccagtcaattacaatcgataacgcttctgaataacttggcatttggatacctccaatcgtcaaccaatttaatatactgattatagtataagctattagtgcattcagtagcctctttataggctagcaatggtctataattcgaaaggagagtatgctagcagggtttttgatagagtaataggctacgattacatacccctgctagctctgccaa

SEQ ID NO: 1210 - RNA, 279 nt, Synthetic construct
  source 1..279: mol_type = other RNA
gcctgcggggagtcgctcgcagggaagagtgttcgagttgtcaacttcgagccggccaccgagaacaactcggcccgcaactcgaagcgaccacctcggagcgaaagctctgaccagggttagcaacttcacaaccactcctccataatagctatcgtcgttcagacgcgcggcgcgccgaagcgaaaccacaacgctaaggcagagtaacatcccacttcggtggcgtgagtaaatgtccggagcacacagcgggcgccgcaagcccccgtgctccgg

SEQ ID NO: 1211 - RNA, 279 nt, Synthetic construct
  source 1..279: mol_type = other RNA
gccctaagcgtaaggcttaggggtgatgtacaggttgtcaactctcggacagcgaccttcgctgaatacctcccagaggctgattaacaggtggacgatgctcataacgatctccatgatactgattacattatacagtgtttctaacatttgcggtgaaatgcacttagcctacttgtagtgctatgtgtatgagaaggttggataaagaccactttgttaagccggggcaatgtttttctgaacgaccgcagttcgaaattgccccggtttcacaat

SEQ ID NO: 1212 - RNA, 269 nt, Synthetic construct
  source 1..269: mol_type = other RNA
aggcataggggtgatgtacagtttgtcaactcccggccagcgaccttcgctgaacaccgaccagaggctgaccaacaagtggacgatgctcataacggtctccatgatactgattacattatacagtgtttcaaacatttgcggtgaaatgcgcaattggattctgttgagttctttgtgtatgagaaggttggagaaagaccactttgttaagccggggtgatgtttttttgaatgaccgcagttcgaaatcgccccggtttcacaat

SEQ ID NO: 1213 - RNA, 267 nt, Synthetic construct
  source 1..267: mol_type = other RNA
gctcccggatttgccgggtaggaaagtgacaggttgtcaagccacgccgaattgctcgccgagcacagacgcagtgcagacaacgcgtagaccgcgatttccatcatatggaactccacgtttatactgacatgatattgcatttctaacattaagcggccaaagcccggatgcaataaccgggtgagataatgtaaagaacattggtgtatatccgggggtgcgtattttggattgccgccaaccgccgctcccccggtttgctag

SEQ ID NO: 1214 - RNA, 250 nt, Synthetic construct
  source 1..250: mol_type = other RNA
gctctatgtgtaggcatagaggattgtgacagtttgtcaatgtatttactctggcagagccaagataagcacattgcaacgaggtgtaagattatcatcgtatagtctccatccttgataacatcatatatcatttctaatagttagcggctcgtaccccttggggtcaaatgattggttaggccagttagttaaagcccaagaggatatacggaaaggccgcatatccactcctcttgggttttgctag

SEQ ID NO: 1215 - RNA, 251 nt, Synthetic construct
  source 1..251: mol_type = other RNA
gcttcacgcgaaaggcgtggaggtttgtgacagattgtcaatgccgttgcgcttgctgaggcaagacaacaacattgtcatgaggtgtacgattatcatcatatagtctccatcgcagattacattatacatcatttctaatagatcgcggcgagtgcctttcggggccagatgattggttaggccagttagttaaagcccaaggggatatacggaaaggccgcatgtccactcctcttgggttttgctag

SEQ ID NO: 1216 - RNA, 298 nt, Synthetic construct
  source 1..298: mol_type = other RNA
acttaatacagtggtattaaggagagttattgttgtcaagctcatctgaaggaattcgagagaaatctttcttgagattggcaagcagtctgctgaggatacaaccaaagcaaagacagctaatgtacacaaagtagtcattagtaactcctgctcaattataacatatttgagtattgctatttgggtagctggtgattccgtacacaaacactatttggtgattcgaaatgccacgtaaaaaaactagatccgtcagcttaggaatgctatcctccgtgctgacggattttgcaat

SEQ ID NO: 1217 - RNA, 280 nt, Synthetic construct
  source 1..280: mol_type = other RNA
gccctatgtgtaggcataggggtgatgtacagtttgtcaactcccggccagcgaccttcgctgaacaccgaccagaggctgaccaacaagtggacgatgctcataacggtctccatgatactgattacattatacagtgtttcaaacatttgcggtgaaatgcgcaattggattctgttgagttttttgtgtatgagaaggttggagaaagaccactttgttaagccggggtgatgtttttttgaatgaccgcagttcgaaatcgccccggtttcacaat

SEQ ID NO: 1218 - RNA, 261 nt, Synthetic construct
  source 1..261: mol_type = other RNA
gctcaccggtttagccgctgaggaacatcacaggttgtcaacacgaatcgtgccgcgcaagcagaccgaaatcgatgacagcaaccagactgcgagctgcgccatgcgtgcctccatgtctatactgagatgatacgtcatttctaacattaagcggccaaagcccatgcaaatgggtgagatgatgcgaagagcgtttgtgtatatccgggggagtggcctataggaatgccgccaaccttcattcccccggtttgctag

SEQ ID NO: 1219 - RNA, 309 nt, Synthetic construct
  source 1..309: mol_type = other RNA
gcctttggagtaggttgctacctagctcgcaaagggagatagtttgaactgtcaaacagtttgttaagaagtattgtaataaggaacctagcccataaggcaatccaaggtttcaacactaacaatatcattatcaagtagtttgtaatcatactacctcctatagtatagcatgttaagtttaatgcgtttgtcaaagtcttttttgactaaatctagtgctgggtttaagaaatttttagaccaaagtttgaagactccgtaagggcgtaaagtgagacgcgccacaagcccttacggatctgctaa

SEQ ID NO: 1220 - RNA, 270 nt, Synthetic construct
  source 1..270: mol_type = other RNA
gctcatggcataggccctgaggtgcatcacaagctgtcaagccccaaggcggttccggaagaataacatcctacgattaccagcaatgcggccagcagcccacggagacttatcttcatagatactccaagtgtgacgctgacattatatgtcgatcctagcaatcgcggtgaggccgggtaaccggttagatggtgtgaagaacatttgggtttatccgaccgagcggctgaaggattgccgccatcctatgctcggtcggttggctcg

SEQ ID NO: 1221 - RNA, 281 nt, Synthetic construct
  source 1..281: mol_type = other RNA
gccctaggtgaaggcttaggggtgatgtacagtttgtcaactctcggacagctaacttcgctgcaaaccgaccagagtatgaccaacaagtggacgatgctcataacggtctccataatactgattacattatacagtgtttctaacatttgcggtgaaatgcactatctgggctacttgtagttctatgtgtatgagaaggttggataaagaccactttgttaagccggggcaatatttttctgaatgaccgcagttcgaaattgccccggtttcacaaa

SEQ ID NO: 1222 - RNA, 283 nt, Synthetic construct
  source 1..283: mol_type = other RNA
gcttttaatatttgcgtaagcaattgattaaaaagtgcttaacaagctgtcaaacctgtccaacaagcttgttgtgcagaatgacagcaatgcatagatgagtgtcttcatagatacctccagtgttactgttacagtgatagcatattcgatattgaacataccgcggctattggtagtttttaaggctacgaatgacggtctctgcacctgttaatatccgaaggagcgctctgatttttcagatggagcgccgcagtcctagctccttcggttttgcccc

SEQ ID NO: 1223 - RNA, 90 nt, Synthetic construct
  source 1..90: mol_type = other RNA
ctttcaattataacatgattgaagattgggcgaattgaaggatggctggtatgacatgcacagcaaggcttattgccgagtaagaatacc

SEQ ID NO: 1224 - RNA, 254 nt, Synthetic construct
  source 1..254: mol_type = other RNA
gccttcaatgtaggttgaagggtgaagtgtttaagttagtgaatatataagtacctagcaataagtataccaagtttattggttcgctcagtgtgctctctgacagtccaaacggcattagttctgtacctttcaacagaatttgtctgtatgcatttaagaagtattcatataacatagcatttaatttgtttaaaatcctcactggtaaaacagtatgtccaagtaagaatttgattcttgcaaggtttcaa

SEQ ID NO: 1225 - RNA, 250 nt, Synthetic construct
  source 1..250: mol_type = other RNA
gctccacgtaaagacgtggaggtgtgttacaagttgtcaattccgcccggcagcgtgatcgccaggacgattgatagcagagcgatgacaggattccgcaaggatacctccagtagcatgtgaacattgtacgtcattcctaacatatgcggctcggcccctctcggggtgagatggtaagaggattacttggtttatccggaagggcggttagtagagtgccgccatctgagcccttccggtttgctag

SEQ ID NO: 1226 - RNA, 247 nt, Synthetic construct
  source 1..247: mol_type = other RNA
ggttcgccaggggaacgggaggaacggttgaagctgtcaaggccgaatgcgatccccaccaggagaaacgcgaggttcatgttgacctccgacatcttgttgcggttgcacgaagtcgcccacgcgaacatcgcttggatagcagtatagaccagctcgtcgaagattctgcagacttagagttagtttcgactagctcgccgccaacagtgtggagcggaagcgataatcgcatgcaggcgtagct

SEQ ID NO: 1227 - RNA, 251 nt, Synthetic construct
  source 1..251: mol_type = other RNA
gctttacgcgaaaggcgtgaagggctgtgacagattgtcaatgcatttatccttgcagagccaagataaacacattgtcatgaagcgtaagattaccattgtatagtctccatcgcagattacattatatatcatttctaatagatcgcggcgtgtgcctttaggggccagatgattggttaggccagttagttaaagcccaaagggatacacggaaaggccgcatgtccactccctttgggttttgctag

SEQ ID NO: 1228 - RNA, 261 nt, Synthetic construct
  source 1..261: mol_type = other RNA
gcttacttatttaggaagtaaggtgtatcacaagctgtcaagtagaacgctcaccagtacactggctagcagacgacttgcatggccgcagatggctagtagactcacgtcgaacactcctgcgatgatggtatcatatatcatatctgacattcgtggccgacatcatatagatgttgtgaatgcgtatttaagtacgtttgttaagcccggattgggaatcggatggccacagtcctttacctttccgggttttgcaat

SEQ ID NO: 1229 - RNA, 309 nt, Synthetic construct
  source 1..309: mol_type = other RNA
gcctttggagtaggttgctacctagctcgcaaagggagatagtttgaactgtcaaacagtttgttaagaagtattgtaataaggaacctagcccataaggcaatccaaggtttcaacactaacaatatcattatcaagtggtttgtaatcatactacctcctatagtatagcatgttaagtttaatgcgtttgtcaaagtcttttttgactaaatctagtgctgggtttaagaaatttttagaccaaagtttgaagactccgtaagggcgtaaagtgagacgcgccacaagcccttacggatctgctaa

SEQ ID NO: 1230 - RNA, 251 nt, Synthetic construct
  source 1..251: mol_type = other RNA
gctttacgcgaaaggcgtgaagggctgtgacagattgtcaatgcctttatccttgcagagccaagataaacacattgtcatgaagcgtaagattgccattgtatagtctccatcgcagattacattatatatcatttctaatagatcgcggcgtgtgcctttaggggccagatgattggttaggccagttagttaaagcccaaagggatacacggaaaggccgcatgtccactccctttgggttttgctag

SEQ ID NO: 1231 - RNA, 252 nt, Synthetic construct
  source 1..252: mol_type = other RNA
ggcgatcacttcggtgagtcgtttgttaagactgtcaagcccaagaatcgcgagcagcgcttcgagtagtgccattgtgtaacctccgatctgctgactcacctggcgcttggttgggatgatcttccgtaacaggaatttcgttatcccgatgaccacagtataacagacttcgtcggacctcttcaggttagagccgcttggctcgcagacaatggtgaggggcgggccacgttgatgaagacgacaggt

SEQ ID NO: 1232 - RNA, 252 nt, Synthetic construct
  source 1..252: mol_type = other RNA
gctttacgcaaaaggcgtgaaggattgtaacagatggtcaatgtctcgattcttgctttgccaagataaacacattgccatgaggtgtaagattatcatcatatagtctccatcacagattacattacatatcatttctaatagatcgcggcgcgtgccttttaaggccagatgattggttaggccagttagttaaagcccaagagaatatatgaaaaggccgcatatttcacttctcttgggttttgctag

SEQ ID NO: 1233 - RNA, 252 nt, Synthetic construct
  source 1..252: mol_type = other RNA
gctttacgcaaaaggcgtgaaggattgtaacagattgtcaatgtctcgattcttgctttgccaagataaacacattgccatgaggtgtaagattatcatcatatagtctccatcacagattacattacatatcatttctaatagatcgcggcgcgtgccttttaaggccagatgattggttaggccagttagttaaagcccaagagaatatatgaaaaggccgcatatttcacttctcttgggttttgctag

SEQ ID NO: 1234 - RNA, 252 nt, Synthetic construct
  source 1..252: mol_type = other RNA
gcttcacgcgaacggcgtgaaggattgtaacaggttgtcaatatgtcgattcttgcttagccaagataaacgcattgccaagaggtgtaagattatcatcatatagtctccatcacagattacattacatatcatttctaatagatcgcggcgtgcgcctttagaggccagatgattggttaggccagttagttaaagcccaagagaatatccagaaaggccgcacattctacttctcttgggttttgctag

SEQ ID NO: 1235 - RNA, 283 nt, Synthetic construct
  source 1..283: mol_type = other RNA
gcttttaatatttgcgtaagcaattgattaaaaggtgcttaacaggctgtcaaacctgtccaacaagcttgttgtgcagaatgacagcaatgcatagatgagtgtcttcatagatacctccagtgttactgttacagtgatagcatattcgatattgaacataccgcggctattggtagtttttaaggctacgaatgacggtctctgtacctgttaatatccgaaggagcgctctgatttttcagatggagcgccgcagtcctagctccttcggttttgcccc

SEQ ID NO: 1236 - RNA, 328 nt, Synthetic construct
  source 1..328: mol_type = other RNA
gcctttggggtaggtttcctagcaataggtttcttaggtcgcaaaggggggcggtttgaactgtcaagcagtttgttaagcagtattgtagtaaggaacctagcgagtaaggcactccatggtttcagcactaacaatatcattatcaagtggtttgtgatcatactctctccagtagtattatagcatgttaagtttaatgcgttggtcaaagcggttttttgactaaatctagtgctgggtttaagaagtttttaaaccaaagtttgaagactccgcagggcgtaagtaacgtgagacgcgccacaagcccttgcggatctgctaa

SEQ ID NO: 1237 - RNA, 268 nt, Synthetic construct
  source 1..268: mol_type = other RNA
gctctccggatcgccggagaggaaagtgacaggttgtcaagccacgccgaattgctcgtagagcacagacgcagtgcagacaacacgtagaccgcgatttccgtcatacggacctccaagtttatactgacatgatattgcatttctaacattaagcggccaaagcccgaattataatcgggtgagataatgtaaagaacattggtgtatatccgggaatgcgctgttttttggaatgccgccaaccgccgcattcccggtttgctag

SEQ ID NO: 1238 - RNA, 267 nt, Synthetic construct
  source 1..267: mol_type = other RNA
gcctggcggctcgggcgctagggaatgtcacagaatgtcaagccattccaggcagccttcacggcagcctgtcatgattgacgcgagcattgcgacggtaatccgcatggatacctcctttgtgatatagacattatatatcattgctaacagaagcggcgcggccccgagttatgctctgggtgggatggtgagagaaagtccacttggttaagccggagaggggtttggatcgccgcagtcctttaccctctccggttttgctaa

SEQ ID NO: 1239 - RNA, 257 nt, Synthetic construct
  source 1..257: mol_type = other RNA
gaaaatatcacgtgaagtgagttatttgttaatactgtcaaggcatatttgcataatctgtgcgatagaatcctccattagggtatatccgtacaatttgtgacactgcgtcttgatcgggccgaatttctcaatgagatatttcgcaatcccgacaattacagtataacagacatcgtcgaacctcttcaggttagagccgtcgggctcggagacaatagtgtggggcgggtcacaagttgatgaagacaactgat

SEQ ID NO: 1240 - RNA, 266 nt, Synthetic construct
  source 1..266: mol_type = other RNA
gctctccggattcgccggagaggaaagtgacaggttgtcaagccacgccgaattgctcgtagagcacagacgcagtgcagacaacacgtagaccgcgatttccgtcatacggacctccaagtttatactgacatgatattgcatttctaacattaagcggccaaagcccgaattataatcgggtgagataatgtaaagaacattggtgtatatccgggaatgcgtattttggagtgccgccaaccgccgcattcccggtttgctag

SEQ ID NO: 1241 - RNA, 267 nt, Synthetic construct
  source 1..267: mol_type = other RNA
gctcatcggatttgccgatgaggaaagtgacaggttgtcaagccacgcgaatccgctccatgagctgagacgcaacgcggacaacacgtagaacaggatttccgtcatacggacctctacgatgatactgccatgatactgcatttctaacatttagcggccaaagctcagttttcggactgagtgagataatgtgaagaacattgttgtatatccggggaggcggttactggaatgccgccaaccatcgcctctccggtttgctag

SEQ ID NO: 1242 - RNA, 247 nt, Synthetic construct
  source 1..247: mol_type = other RNA
ggttcgccaggggaacgggagaaacggttgaagctgtcaagaccgaatgcgatccccaccaggagaaacgcgaggttcatgttgacctccgacatcttgttgcggttgcacgaagtcgcccacgcgaacatcgcttggataacagtatagaccagctcgtcgaagattctgcagacttagagttagtttcggctagctcgcagccaacagtgtggagcggaagcgataatcgcatgcaggcgtagct

SEQ ID NO: 1243 - RNA, 286 nt, Synthetic construct
  source 1..286: mol_type = other RNA
gccttcgtcaaagggcgaagggagtgtcacaagatgtcaagtaccattagaccgtcgcacaatgcgataagttccatggcaactaacgtcatccagtcggcaaggttgcaattcattgtaatctccactgtgatacagacatcataattcatgtctaacatgtgcggttcgccttgcgttagtgggcaagcacactaaacgctggccaaaaggtgtattaaattgcaccagttaagccaagtggggctaagatgccgcagtcagatgcctcacttggttttgctag

SEQ ID NO: 1244 - RNA, 280 nt, Synthetic construct
  source 1..280: mol_type = other RNA
gccttatgtgtaggcataagggtggtgtacagtttgtcaactcttgggcagtagccttcgctacaaatcgaccagagattgcttaacaagtggatgatgctcataacggtctccatgatactgattacattatacagtgtttctaacatttgcggtgaaatgcgcatttgaattcttttgaattctttgtgtgtgagaaggttggataaaaaccactttgttaagccggggcgatgtttttctgaatgaccgcagttcaaaattgccccggtttcacaat

SEQ ID NO: 1245 - RNA, 278 nt, Synthetic construct
  source 1..278: mol_type = other RNA
gccctaagcgaaggcttgggggaggtgtacagtttgtccagtcccggccagcgagtttcgcaacacgccgagcagagattgaacaacaggtggacgatgctcataacgatctccattaggctgattacattatacagtgtttctaacatttgcggtgaaatgcatctctggttacttgttaatcagtatgtatgagaaggttggataaagaccactttgttaagccggggtaatattttgtgaacgaccgcagttcgaagttgccccggtttcacaat

SEQ ID NO: 1246 - RNA, 278 nt, Synthetic construct
  source 1..278: mol_type = other RNA
gccttggggaaacacgtctcaagggcgtgtcacaagttgtcaacaccggcagcacagctcaacgctgatgcaagcctaagtattgataacgtccagttgatgaggttacaagtcattgtgatctccactgtgatactgacatagtaaaccatgtctaacatgtgcggtgtgcctgctcgacttgagttggccagatggtgtgattcaactccacccagttaagccaagcgggagcacagcggaagccgcatgtcccttgccccgtttggttttgctaa

SEQ ID NO: 1247 - RNA, 250 nt, Synthetic construct
  source 1..250: mol_type = other RNA
gctccacgtaaagacgtggaggtgtgttacaagttgtcaagtccgaccggcagcgtgatcgccaggacgattgatagcagagcgatgacaggattccgcaaggatacctccagtagcatgtgaacattgtacgtcattcctaacatatgcggcgcggcccctcttggggcgagatggtaagaagattacttggtttatccggaagggcggttagtagaatgccgccatcttagcccttccggtttgctag

SEQ ID NO: 1248 - RNA, 258 nt, Synthetic construct
  source 1..258: mol_type = other RNA
gcttacttttttggaaagtaaggtgtatcacaagctgtcaagtagaatacgaaccagaacactggcgagtagacgacttgcatagccgcagatgattagtagattcatatcgaacactcctgcgatgatgatagcatatatcatatctgacattcgtggccggcatcattgatgttgtgaatgcgtacctagtgcgttacctaagcccggagaggaaactggatggccacagtcctttacctttccgggttttgcatt

SEQ ID NO: 1249 - RNA, 309 nt, Synthetic construct
  source 1..309: mol_type = other RNA
gcctttggagtaggttgctgcctagctcgcaaagggagatagtttgaactgtcaaacagtttgttaagaagtattgtaataaggaacctagcccataaggcaatccaaggtttcaacactaacaatatcattatcaagtggtttgtaatcatactacctcctatagtatagcatgttaagtttaatgcgtttgtcaaagtcttttttgactaaatctagtgctgggtttaagaaatttttagaccaaagtttgaagactccgtaagggcgtaaagtgagacgcgccacaagcccttacggatctgctaa

SEQ ID NO: 1250 - RNA, 261 nt, Synthetic construct
  source 1..261: mol_type = other RNA
gcttacttatttaggaagtaaggtgtatcacaagctgtcaagtagaacgctcaccagtacactggctagcagacgacttgcatggccgcagatggctagtagactcacgtcgaacactcctgcgatgatggtatcatatatcatatctgacattcgtggccgacatcatatcggtgttgtgaatgcgtatttaagtacgtttgttaagcctggattgggaatcggatggccacagtcctttacctttccgggttttgcaat

SEQ ID NO: 1251 - RNA, 301 nt, Synthetic construct
  source 1..301: mol_type = other RNA
gcctcataaaagtagttatgagggaaattggtgaatttctgtcaagctttatctcaattgtaatcacaaggctgacccagctaattacaatcgataacgcttctgaataacttggcatttggatacctccaatcgtcataatcaaccaattcaatatactaattatagtataagctattagtgcatttagtagcctctttataggctagcaatggtctataatttgaaaggagagtatgcttgcaagggttctttgatagagtaataggctacaattacatacccttgctagctctgccaa

SEQ ID NO: 1252 - RNA, 267 nt, Synthetic construct
  source 1..267: mol_type = other RNA
gctcatcggatttgccgatgaggaaagtgacaggttgtcaagccacgcgaatccgctccatgagctgagacgcaacgcggacaacacgtagaacaggacttccgtcatacggacctctacgatgatactgccatgatactgcatttctaacatttagcggccaaagctcagttttcggactgagtgagataatgtgaagaacattgttgtatatccggggaggcggttactggaatgccgccaaccatcgcctccccggtttgctag

SEQ ID NO: 1253 - RNA, 261 nt, Synthetic construct
  source 1..261: mol_type = other RNA
gcttacttatttaggaagtaaggtgtatcacaagctgtcaagtagaacgctcaccagtacactggctagcagacgacttgcatggccgcagatggctagtagactcacgtcgaacactcctgcgatgatggtatcatatatcatatctgacattcgtggccgacatcatatcggtgttgtgaatgcgtatttaagtacgtttgttaagcccggattgggaatcggatggacacagtcctttacctttccgggttttgcaat

SEQ ID NO: 1254 - RNA, 264 nt, Synthetic construct
  source 1..264: mol_type = other RNA
gcccgatgcgtaggcgtcgggggaagaggttactcctgtcaactgttataattccatgaggaatttggcgattgataggaccgatgcgacgatcgacatgatctccgcgattcggccctgggtgcttacttcattatagcgcactgcgtttcatgcgacgcggaacgactgtcagatgacatgctggcatggtttgaggcggatcaaagttgtttcggggaaggattaggaggacgcgttcctttgccttccccgacttgctgt

SEQ ID NO: 1255 - RNA, 269 nt, Synthetic construct
  source 1..269: mol_type = other RNA
gcttatcggagtttgccgttaaggaaagtgacaggttgtcaagcgccgcgaatccgctccacgagcagagacgcaaagctgacaacgcgtagaacaggatttccgtcatacggacctctacgttgatgctgacatgatattgcatttctaatatttagcggccaaagcccaggcttttgtctgggtgagataatgtgaagaacattgctgtatatccggggaggcgctttattggattgccgccaaccatcgtctccccggtttgctag

SEQ ID NO: 1256 - RNA, 274 nt, Synthetic construct
  source 1..274: mol_type = other RNA
gcttttgatagcgacttgagtcgttgatcaaaaggtgtctaacaggttgtcaagttctatagggacgccaataaggctaactgagacgaaccacgacaggaactggaatagggtcttcatagatacctccacggtgatagttatatcgtaactcatttctaacatgacgcggctagggttttcgaactcttagatggttgttttaacaacttagttaagccgaggtaagacgtaaggaattgccgcagttctaagtctgcctcggttttgctag

SEQ ID NO: 1257 - RNA, 233 nt, Synthetic construct
  source 1..233: mol_type = other RNA
ggtattcccgaggggacggagaatagcttgaagctgtcaagcccgaaagctgccagcagtattgctacgatgtccatcaggacctccatgcgtatctggacgcccacggtgcatgaagagcaattcttcatacagccaatatagtccattatctcgactaaatgtgccgtagggtttccaggcccgttctaaacagtcgggggcgagaggttaaccggaagcacaacggttct

SEQ ID NO: 1258 - RNA, 232 nt, Synthetic construct
  source 1..232: mol_type = other RNA
tggtgccgctagggcattcagtttcgtgtttacactgtcaaggtttcctgagtgaactttcataaagatttccataactggaactccgattgttaaccaccagcgtgctttgccagcataccggcaatacataattgccaactgtatgataacatacacgactacgtcgaagataaacgcaaccgtctgaacagcgggggcgggactgttaagggttatgcgttggcctgat

SEQ ID NO: 1259 - RNA, 279 nt, Synthetic construct
  source 1..279: mol_type = other RNA
gccctatgtgtaggcataggggtgatgtacagtttgtcaacttccggatagcgcacttcgctgcacaccgcccagaggctgaccaacaagtggatgatgctcacaacggtctccatgatactcgttacattatacagtgtttctaacatttgcggtgaaatgcactttggattcttttgagtacctagtgtatgagaaggttggataaagaccactttgttaagccggggcgatgtttttctgaatgaccgcagttcaaaatcgccccggtttcacaat

SEQ ID NO: 1260 - RNA, 189 nt, Synthetic construct
  source 1..189: mol_type = other RNA
gcattacgataaaaagacgtaatggaaaaggattgttgtcaatgctgttatgccgaatttattcataaattctagattcagttcgacaactaatcggcgcagatctacgccttggaataacttataggtagtgattatacagatattcaacaatattaagctggttatcatgtgcgcgcctccttctaa

SEQ ID NO: 1261 - RNA, 312 nt, Synthetic construct
  source 1..312: mol_type = other RNA
gctttacgcgaaaggcgtgaagggctgtgnnnnnnnnnnagattgccattgtatagtctccatcgcagattacattatatatcatttctaacagattgtcaatgcctttatccttgcagagccaagataaacacattgtcatgaagcgtaagattgccattgtatagtctccatcgcagattacattatatatcatttctaatagatcgcggcgtgtgcctttaggggccagatgattggttaggccagttagttaaagcccaaagggatacacggaaaggccgcatgtccactccctttgggttttgctag

SEQ ID NO: 1262 - RNA, 251 nt, Synthetic construct
  source 1..251: mol_type = other RNA
gcttcacgcaaaaggtgtggagggctgtgacagattgtcaatgtatttatccttgcagagccaagataaacacatcgtcatgaagcgtaagattaacatcgtatagtctccatcgcagattacattatatatcatttctaatagatcgcggcgagtgcctctcggggccagatgattggttaggccagttagttaaagcccaagaggatatacggaaaggccgcatgtccacttctcttgggttttgctag

SEQ ID NO: 1263 - RNA, 279 nt, Synthetic construct
  source 1..279: mol_type = other RNA
gccctaagcacaaggcttaggggtgatgtacagtttgtcaactctcggacagcgaccttcgctgaatacctcccagaggctgattaacaggtggacgatgctcataacggtctccatgatactgattacattatacagtgtttctaacatttgcggtgaaatgcacttagcctacttgtagtgctatgtgtatgagaaggttggataaagaccactttgttaagccggggcaatgtttttctgaacgaccgcagttcgaaattgccccggtttcacaat

SEQ ID NO: 1264 - RNA, 254 nt, Synthetic construct
  source 1..254: mol_type = other RNA
gcttcacgcgaaaggcgtggagggctgtgacagattgtcaatgtatttatccttgcagagccaagataaacacatcgtcatgaagcgtaagattaacatcgtatagtctccatcgcagattacattatacatcatttctaatagatcgcggcgagtgcctttcgggggggccagatgattggttaggccagttagttaaagcccaagaggatattcggaaaggccgcatgtccactcctcttgggttttgctag

SEQ ID NO: 1265 - RNA, 278 nt, Synthetic construct
  source 1..278: mol_type = other RNA
gctcagtgcggtaggtgctgaggtgtgtcacaggttgtcaagcgtaattattggcgtgcctccgaggtatactgagaatattgacaacaccacgcatgcgagaatcttcatggatacctccatcgtgagagtgatacaagtattataaatcatttctagcagacgcggcgtggctcttctgttcgcaggagggtgagatggtgtgagaaaggccacttggcttagccggatggaggctgtgagatagccgcagtcttatgccccatccggtttgctgt

SEQ ID NO: 1266 - RNA, 270 nt, Synthetic construct
  source 1..270: mol_type = other RNA
gctcatggcataggccctgaggtgcatcacaagctgtcaagccccaaggcggttccggaggaataacatcctacgattaccagcaatgcggccaacagcccacggagacttatcttcatagatactccaagtgtgacgctgacattatatgtcgatcctagcaatcgcggtgaggccgggtaaccggttagatggtgtgaagaacatttgggtttatccgaccgagcggctgaaggattgccgccatcctatgctcggtcggttggctcg

SEQ ID NO: 1267 - RNA, 245 nt, Synthetic construct
  source 1..245: mol_type = other RNA
gcttttgatatttgtacgcaattgatcaaaaggtgctgcacaggctgtcaaacctactcaataacattattgagcagaatgacagcaatgctttgataagtgtcttgataggcacctccagagttattgtgatggtgatagcatattctatgtttaacatgacgcggctttgacggtcgtttagaccagttaatccgaaggagcgttcagaattgccgcagttctagcttcttcggttttgctct

SEQ ID NO: 1268 - RNA, 267 nt, Synthetic construct
  source 1..267: mol_type = other RNA
gccttgagtgtaggcttaagggaaatgtacaggttgtcaagccatgggcagcgttcttcacagcacgccgaccagacggtatacagcacttggatgacgctcatcacggtctccataacactagtcacattatgtagtgtttctaacatttgcggtgaggttcgtcaaagtaacgatggatgagaaggttggataaaaaccactttgttaagccgggatgatgagttattggacggccgcagtccaatcatctctcggttttgcaat

SEQ ID NO: 1269 - RNA, 251 nt, Synthetic construct
  source 1..251: mol_type = other RNA
gcttcacgcgaaaggcgtggaggtttgtgacagattgtcaatgccgttgcgcttgctgagccaagacaacaacattgtcatgaggtgtacgattatcatcatataatctccatcgcagattacattatacatcatttctaatagatcgcggcgagtgcctttcggggccagatgattggttaggccagttagttaaagcccaaggggatatacggaaaggccgcatgtccactcctcttgggttttgctag

SEQ ID NO: 1270 - RNA, 252 nt, Synthetic construct
  source 1..252: mol_type = other RNA
gctttacacaaaaggtgtaaagggttgtaacagattgtcaatgcatcgctctctggttcgccaagaaaacaacattgccatgaggtgtaagattatcatcgtatagtctccatcgaatattacattataaatcatttctaatagatcgcggtgagtgcctttaggggccagatgattggttaggccagttagttaaagcccaaaagaatataaagaaaggccgcatattctacttcttttgggttttgctag

SEQ ID NO: 1271 - RNA, 251 nt, Synthetic construct
  source 1..251: mol_type = other RNA
gcttcacgcaaaaggtgtggaggactgtgacagattgtcaatgtatttatccttgcagagccaagataaacacatcgtcatgaagcgtaagattaacatcgtatagtctccatcgcagattacattatatatcatttctaatagatcgcggcgagtgcctctcggggccagatgattggttaggccagttagttaaagcccaagaggatatacggaaaggccgcatgtccacttctcttgggttttgctag

SEQ ID NO: 1272 - RNA, 121 nt, Synthetic construct
  source 1..121: mol_type = other RNA
gcctttgaagaagatcaaaggggaattggtttaatgtcaagtctgacgttatctttagcttcaacgttgaatctaaagctaactcaattatcaaactgagtatcgtcagaaggttgatgaa

SEQ ID NO: 1273 - RNA, 237 nt, Synthetic construct
  source 1..237: mol_type = other RNA
cttctcggagggacggagcgacggttgaaactgtcaaggcaaatgttgacgaataactgaatgagtaattgatccaatgtggtctctcgtcggttgtagtccgcatgcgctccgaaggcgtaaagccccaggatgacataatagactagaatatcgatctgttgcggatctagagttggtgacgactcgtaacaaacggtgtggggcggggagataattcggaccgcaaccgaatgc

SEQ ID NO: 1274 - RNA, 265 nt, Synthetic construct
  source 1..265: mol_type = other RNA
gcctcagtttttagagctgggggaatactacaggatgtcaagcaatataatgatgtcaatatgacatgttatcttgaatgacagggcgaccggtaagggcagcatacagttgttctccacgacgctacacatagtatatgtgattgttaacacacgcggctcgcaccagaatatcggtgtcagatggtgctttgaatgcacttggttatgccggtaggggcaaattgagatggccgcaatctcttgcccctaccggtttggctaa

SEQ ID NO: 1275 - RNA, 273 nt, Synthetic construct
  source 1..273: mol_type = other RNA
gcctgctccgtttgggggcagggctgaacttgccaagtcaaggtttcctgcggcgagagccaacagaaacattgatgtagcaaagaatcttcctgtcatctggactgcaaggtttaggtgtatggtcgcattcatcggttcatcatagagcatgaagcttgtcatgcggcgtcagcatcggctttgccgttcgcggaagaaaggcccggacagccgggtcgccaaactggggagaggctttggattagccgcctccttctctccccagttgag

SEQ ID NO: 1276 - RNA, 268 nt, Synthetic construct
  source 1..268: mol_type = other RNA
gctccccggatttgccgggaaggaaagtgacaggttgtcaagccacgccgaattgctcgaagagcatagacgcagagcagacaacacatagaccgcgatttccgtcatacggatctccaagtcgatactgacatgatattgcatttctaacattaagcggccaaagcccggatgcaataaccgggtgagataatgtaaagaacattggtgtatatccgggggtgcgtattttggattgccgccaaccgccgctcccccggtttgctag

SEQ ID NO: 1277 - RNA, 281 nt, Synthetic construct
  source 1..281: mol_type = other RNA
gccctatgcataggcgtgggggtgatgtacagtttgtcaactctcggacagctactttcgctgaacacctcacagaggctgattaacaagtggatgatgctcataacggtctccatgatactgattacattatacagtgtttctaacatttgcggtgaaatgcactattgggctcttttgtagttctttgtgtatgagacggttggataaagaccactttgttaagccggggcgatgtttttctgaacgaccgcagttcgaaatcgccccggtttcacaat

SEQ ID NO: 1278 - RNA, 262 nt, Synthetic construct
  source 1..262: mol_type = other RNA
gcttttaataattactaattagtaattgattaaaaggtacgtaacaagatgtcaatgtcaaacctgctcagtaagcttactgaacagaatgacagtgacaagatcatgtggataagcgtcttcatagatgtctccaaagtaattgttaaagtgatagcataatttatattgtacataacacggctaatgacggctgtaatggccagttaatccgagggtgcgtttagaattgccgtagttcgagcatcctcggttttgatct

SEQ ID NO: 1279 - RNA, 251 nt, Synthetic construct
  source 1..251: mol_type = other RNA
gctttacgcgttaggtgtaaaggtttgtgacagattgtcaatgccgttgcgcttgctgagccaagacaacaacattgtcatgaggtgtacgattatcatcaaatagtctccatcgcagattacattatacatcatttctaatagatcgcggcgagtgcctttcgaggccagacgattggttaggccagttagttaaagcccaaggggatatacggaaaggccgcatgtccactcctcttgggttttgctag

SEQ ID NO: 1280 - RNA, 322 nt, Synthetic construct
  source 1..322: mol_type = other RNA
gtctccaaaattggttgagagagcaattagtttctaggtttagcaagtttatgaacgttaataaactccctaaaccaccagatgtggagaaccgagactgcgaagcatggatcttctacattgagtaaactaatcacggttattattgcctccttgagatgatgataacataggttttaagagttctctgaaaagagatactagtggtcacagggcactttattctttggaataaaccccgccaaattatgctaggaggttgatctgttatgaacagaagtaatggaccacgacgattacatggccttcctagctcttctaa

SEQ ID NO: 1281 - RNA, 279 nt, Synthetic construct
  source 1..279: mol_type = other RNA
gccctatgtgtaggcataggggtgatgtacagtttgtcaacttccggatagcgcacttcgctgcacaccgcccagaggctgaccaacaagtggatgatgctcacaacggtctccatgatactcgttacattatacagtgtttctaacatttgcggtgaaatgcactttggattcttttgagtacctagtgtatgagaaggttggataaagaccactttgttaagccggggtgatgtttttctgaatgaccgcagttcaaaatcgccccggtttcacaat

SEQ ID NO: 1282 - RNA, 252 nt, Synthetic construct
  source 1..252: mol_type = other RNA
gctttacacaataggtgtaaagggttgtgacagattgtcaatgcatcgttctctggtacgccaaggaatcaacattgtcatcaggtgtaagattatcatcgtatagtctccatcgaatattacattataaatcatttctaatagatcgcggtgagtgcctttcgaggccagatgattggttaggccagttagttaaagcccaaaagaatataaagaaaggccgcaagttctacttcttttgggttttgctag

SEQ ID NO: 1283 - RNA, 260 nt, Synthetic construct
  source 1..260: mol_type = other RNA
tcccgatcgtaagtgagggagtaggttgtttataccgtcaacagctaatttctcgttggtgtcgcgcattgtcgcctcgctcgcttgaatgaagatgggatgatcggtccagacgcaagtctcgatgatcgccactgttacagtatactcgatttcgttcgaaaatgtcccagcagagcgttaggaatggtgctcgacagataatggtgctgggggaagtacgtttccgataggaaaggtccgcatgggacgcggattgt

SEQ ID NO: 1284 - RNA, 240 nt, Synthetic construct
  source 1..240: mol_type = other RNA
gcttgtttgcttggggggaccggagagatagttgaaactgtcaagcccgaagtgagccagcagtatcagagtgacgaggtccattatgatctccatgagataccggcagcgacggactgcacacgagcttcgtgccgtgccgatagtatacaacgttatgtcgttatttagtgccgaaagagcttatggctcgtttttaacggtgtggggcaggagactatggtcaaggcacttggctat

SEQ ID NO: 1285 - RNA, 247 nt, Synthetic construct
  source 1..247: mol_type = other RNA
gcttttgatagttatactcaactgatcaaaaggtgctgaacaggctgtcaaacctactcaataagcttattgagcagaatgacagcaatacttggataagtgtcttgataggtacctccagagttattgttatggtgatagcataatctatgtttaacatgacgcggcttttgacggtctacccagaccagttaatccgaagaagcgcttagaattgccgctgttctagcttcttcggttttgctct

SEQ ID NO: 1286 - RNA, 258 nt, Synthetic construct
  source 1..258: mol_type = other RNA
gctcagtttgtagaaactgaggtgtatcacaagctgtcaagtgctatctgaaccagtaactggaagataagctgcttgaagctatggcaggtgcttactagactcatgtcgaacactcctgacacaacgatattgtaaatcatatctgacattcgtggcccagtgttttcagcactgcgaatgcgtatttaatacgtgtgttaagcccggatagggaactggaaggccacaatcctttacctttccgggttttgcaac

SEQ ID NO: 1287 - RNA, 280 nt, Synthetic construct
  source 1..280: mol_type = other RNA
gccctatgtgtaggtataggggtgatgtacagtttgtcaactcccggccagcgaccttcgctgaacaccgaccagaggctgaccaacaagtggacgatgctcataacggtctccatgatactgattacattatacagtgtttcaaacatttgcggtgaaatgcgcatttggattctgttgagttctttgtgtatgagaaggttggataaagaccactttgttaagccggggtgatgtttttttgaatgaccgcagttcgaaatcgccccggtttcacaat

SEQ ID NO: 1288 - RNA, 253 nt, Synthetic construct
  source 1..253: mol_type = other RNA
tggttaaatagggccaagagttaagtgttatcactgtcaaggccgaccagcagcccgagcgcgatatttataatcacctgtaagtatcctttcgtcgttgcggtcacctggtgtcgccggctgatcagccagctcaccacagtatacgctatgtcgttatgttgcgcagttagagtattcactggccagtccagagttacgctcgtttagaacggtgtggggcagaggctttcaatcgcatgcgcgcgatgct

SEQ ID NO: 1289 - RNA, 250 nt, Synthetic construct
  source 1..250: mol_type = other RNA
gctccacgtaaagacgtggaggtgtgttacaagttgtcaattccgcccggcagcgtgatcgccaggacgattgatagcagagcgatgacaggattccgcaaggatacctccagtagcatgtgaacattgtacgtcattcctaacatatgcggctcggcccctctcggggtgagatggtaagaagattacttggtttatccggaagggcggttagtagaatgccgccatcttagcccttccggtttgctag

SEQ ID NO: 1290 - RNA, 237 nt, Synthetic construct
  source 1..237: mol_type = other RNA
gcgcccgatcggggcgtttcagtgacgtgtttacactgtcaaggcccgtggccaattcggtgcaaagtgcgagttccatgagttgggctcctattgccaggttggacgccggtcggctgcacggtcgccagcacatgcgggcgatctgtactagacagtacacgactacgtcgaagacgaacgcacaccgcagaacggcgggggcgaaaatgctaagggcaagtgcgtttgcccaat

SEQ ID NO: 1291 - RNA, 246 nt, Synthetic construct
  source 1..246: mol_type = other RNA
gctcgtttcattcggaggcgagggatgtcacaggatgtcaagccaaccgaagcaattcgtcaagcatgacagcgtagctatgagtgtccgcatggatacctctacagtgatattgacattatacgtcattgttaacagatgcggcttcgctcagtttatcgagctagaaggtgatgagaaatcacttaggtaagccgggaagggcttaggatggccgcagtccgccgcccttcccggtttggctag

SEQ ID NO: 1292 - RNA, 277 nt, Synthetic construct
  source 1..277: mol_type = other RNA
gccctgagtgtaggcttgggggaggtgtacagtttgtccagtccgggccagcgagcttcgcaacacgccgaccagagactgaacaacaggtggacgatgctcataacggtctccattaagctgattacattatacagtgcttctaacatttgcggtgaaatgcatttctggttacttgcgaatcagtatgtatgagaaggttggataaagaccactttgttaagccggggcaatgtttttgaacgaccgcagttctaagttgccccggtttcacaat

SEQ ID NO: 1293 - RNA, 200 nt, Synthetic construct
  source 1..200: mol_type = other RNA
gactggaggcgtccgagctttagttgaaactgtcaaggtttccgagaatatttatgatgagatccattaggatttccttgtgatgacgacgatgccatatgctggacagcatactgacaatatagacgattacatcgaagaagtgccttacatcctaaacggtgcggagcaaggttgtgactataagggcacatggtcac

SEQ ID NO: 1294 - RNA, 267 nt, Synthetic construct
  source 1..267: mol_type = other RNA
gctcatcggatttgctgatgaggaaagtgacaggttgtcaagccacgcgaatccgctccatgagctgagacgcaacgcggacaacacgtagaacaggatttccgtcatacggacctctacgatgatactgccatgatactgcatttctaacatttcgcggccaaagctcagttttcggactgagtgagataatgtgaagaacattgttgtatatccggggaggcggttaatggaacgccgccaaccgtcgcctccccggtttgctag

SEQ ID NO: 1295 - RNA, 278 nt, Synthetic construct
  source 1..278: mol_type = other RNA
gccctacgcataggcgcaggggtgatgtacagtttgtcaactcccggccagcgaccttcgctgaacaccgaccagaggctgactaacaagtggatgatgctcattactgtctccattatgctgattacattatacagtgtttctaacatttgcggtgaaatgcacaatgggctacaagtagcctattgtgtatgagaaggttggataaagaccactttgttaagccggggcaatgtacgttgaatgaccgcagttcaaaattgccccggtttcacaat

SEQ ID NO: 1296 - RNA, 233 nt, Synthetic construct
  source 1..233: mol_type = other RNA
tggtgccgctagggcatttcagtttcgtgtttacactgtcaaggtttcctgagtgaactttcataaagatttccataactggaactccgattgttaaccaccagcgtgctttgccagcataccggcaatacataattgccaactgtatgataacatacacgactacgtcgaagataaacgcaaccgtctgaacagcgggggcgggactgttaagggttatgcgttggcctgat

SEQ ID NO: 1297 - RNA, 270 nt, Synthetic construct
  source 1..270: mol_type = other RNA
gcttacttatttaggaagtaaggtgtatcacaagctgtcaagtagaacgctcaccagtacactggctagcagacgacttgcatggccgcagatggctagtagactcacgtcgaacactcctgcgatgatggtatcatatatcatatctgacattcgtggccgacatcatataatcatatatgatgttgtgaatgcgtatttaagtacgtttgttaagcccggattgggaatcggatggccacagtcctttacctttccgggttttgcaat

SEQ ID NO: 1298 - RNA, 280 nt, Synthetic construct
  source 1..280: mol_type = other RNA
gccctaagtgtaggcttaggggtgatgtacagtttgtcaactcccggccagcgaccttcgctgcacaccgaccagaggctgaccaacaggtggacgatgctcattatggtctccgtcaagctgattacattatacagtgtttctaacatttgcggtgaaatgcatctctggttcacttgtgaatcagtatgtatgagaaggttggataaagaccactttgttaagccggggcaatgtttttctgaacgaccgcagttcgaagttgccccggtttcacaat

SEQ ID NO: 1299 - RNA, 283 nt, Synthetic construct
  source 1..283: mol_type = other RNA
gctttggatatagatccaaaggtgcatcacaagctgtcaagtcccatcgcggcaccacaggtgaaataacccagggtgaccagcagtgcagacaccagcgctcggatacttattctcataggtactccaagtgtgacgctgacattatacgtcgatcctagcaatcgcggcgaaatcggaactgagtgactgagaccgattggatgatgtgaggagcattttggtttatccggccaggcggcttagaggattgccgccatcctaagcctggccggttggctaa

SEQ ID NO: 1300 - RNA, 276 nt, Synthetic construct
  source 1..276: mol_type = other RNA
gctttaggtgtagtcctaaaggatatgtacaggttgtcaataccagccatggctcccacaatggtcgccaatgcatggattgacgagactaatcgaatcataacggttacgctctccaagatgctgatgacattatatatcatctctaacacttgcggtgtggtccatatcggttaggtttgatgtggatgagaaggtcggataaaggccactaagttaagccgaggaagtgagtttgtgaagtgccgcgattcaatcactcctcggttttgctaa

SEQ ID NO: 1301 - RNA, 209 nt, Synthetic construct
  source 1..209: mol_type = other RNA
gtttaaactgtcaaggccaacttccggggcggtgcagattgcgagttccataattcgggctcctttcgccagccacgcgggcggctttgcggcaatccggcaataccacattgccaggtgcgtcacagtatacacgaccacgtcgacgacgaacgcacaccgcataacggcgggggcggagatgttaagggtcagtgcgttgacccgat

SEQ ID NO: 1302 - RNA, 309 nt, Synthetic construct
  source 1..309: mol_type = other RNA
gcctttggagtactcaatctagttagctcgcaaagggatgttgtttgaactgtccagcagtttgttaagagatattgtaataacgaagcgagccagaaaggctacgattagtttcaacaatatcactacacagttggtcatcatacttcctccaatagtatagcatgttaagttttatgcgttagtcaaagatgttttttgacaaatctagtgctgggtttaagaaagtaataacgttttaagccagagtttaaagactccgtaagggcgtaacgtgtgacgcgccacaagcccttgcggatctgctaa

SEQ ID NO: 1303 - RNA, 235 nt, Synthetic construct
  source 1..235: mol_type = other RNA
ttccactctcggcgcgaaaggagcttctagttgtaactgtcaaggcaattcgcaagacagctgagcagttcgagcaggttactcacttgttccctcgtgttccggcttcccagcgtacgccatgcgaggcttgccacgctgatagtgtaactgattacgtcgaaagactacctatagagctgaccagctcgcagcagacaggcgggacaagagtatatcgcagggtagcggtgct

SEQ ID NO: 1304 - RNA, 309 nt, Synthetic construct
  source 1..309: mol_type = other RNA
gcctttggagtactcaatctagttagctcgcaaagggatgttgtttgaactgtccagcagtttgttaagagatattgtaataacgaagcgagctagaaaggctacgattagtttcaacaatatcactacacagttggtcatcatacttcctccaatagtatagcatgttaagttttatgcgttagtcaaagatgttttttgacaaatctagtgctgggtttaagaaagtaataacgttttaagccagagtttaaagactccgtaagggcgtaacgtgtgacgcgccacaagcccttgcggatctgctaa

SEQ ID NO: 1305 - RNA, 245 nt, Synthetic construct
  source 1..245: mol_type = other RNA
gcctcaacaaattggagttgagggtatgtcacaggatgtcaagccacccggcctcgccggtcaaacttgacagctctacttggatgttcaacttcatggacacctccaggatactgtacgacattgctaacacgcgtggctaggtggcgccctgtgcgttatccgatggtgatgagtagtcatcagttaagccggggggagtgcatggagattgccacggtcttatctccccccggttttgctac

SEQ ID NO: 1306 - RNA, 264 nt, Synthetic construct
  source 1..264: mol_type = other RNA
gctttatgtgtagtcataaaggtttataacagattgtcaatgtatttgttcttccgtcggaagaacacgcacatcgtcatgaagcgtaagattaataaggttatcataatcatataattctcctcgcagattatattataaatcatttctaatagtacgcggtgagtgctctttaagagccagatgattggttaggccagttagttaaagcccaagagaaaactacggaatggccgcatatccacttctcttgggttttgctag

SEQ ID NO: 1307 - RNA, 268 nt, Synthetic construct
  source 1..268: mol_type = other RNA
gctttatgtgtaggcataaaggtatataacagattgtcaatgtacctgttcttccgctggaagaacacgcacgttgtcatgaagcgtaagattaagattatcacagttatagtcacataattctcctcgcagattatattataaatcatttctaatagtacgcggtgagtgctctttaagagccagatgattggttaggccagttagttaaagcccaagagaaagactacggaatggccgcatatccacttctcttgggttttgctag

SEQ ID NO: 1308 - RNA, 281 nt, Synthetic construct
  source 1..281: mol_type = other RNA
gctttggatatagatccaaaggtgcatcacaagctgtcaagccccatggcggcatcccaggtataacaaccaaaggtgaccagcaatgcggccagcagccctcggatacttatcttcataggtactccaagtgtgacgctgacattatacgtcgatcctagcaatcgcggcgaaatcggaactgggtgaccgagaccgattggatgatgtgaggagcatttgagtttatccggccaggcggctgaggattgccgccatcctatgcctggccggttggctcg

SEQ ID NO: 1309 - RNA, 296 nt, Synthetic construct
  source 1..296: mol_type = other RNA
gctcatcttagttgtaagatgaggagatcaacagaatgtcaagtgttgaaactatttctgaaattgttttgactaatgaccagagactaaatattaatttcattatgttcataagtatcataaatgatcctaagtttagaatagttgtagttgattgattataacacatccttagcaagttagcggttcattgtttcaatgtggatgggtatcttgaggtacctcggctatactaaagactgttaattacgaagtaattagagactaccgcaatcctaagtctttagttttgctct

SEQ ID NO: 1310 - RNA, 269 nt, Synthetic construct
  source 1..269: mol_type = other RNA
gcttcgtctgtagagtcgaaggtgtatcacaagctgtcaagtagcaattggaaccagcaacaataactggtgaccacatgccttgagcagccgcacacaacgattagctgaaacatgccgatagttccctgtgacgcaatgatattatacatcatatgtgacatatgagtggcccggcgcataagcgctatgtatacgtaacaactacgtttgttaagcccaagacggtaccagatggccacagtctaagccgtcttgggttttgcaaa

SEQ ID NO: 1311 - RNA, 269 nt, Synthetic construct
  source 1..269: mol_type = other RNA
gcttcgtctgtagagtcgaaggtgtatcacaagctgtcaagtagcaattggaaccagcaaccataactggtgaccacatgccttgagcagccgcacataacgattagctgaaacatgccgatagttccctgtgacgcaatgatattatacatcatatgtgacatatgagtggcccggcgcacaagcgctatgtatacgtaacaactacgtttgttaagcccaagacggtagcggatggccacagtcttagccgttttgggttttgcaaa

SEQ ID NO: 1312 - RNA, 233 nt, Synthetic construct
  source 1..233: mol_type = other RNA
ggtattcctgaggggacggagaattacttgaagctgtcaagcccgaaagctgccagcagtattgctatgatgtccatcaggacctccatgcgtatctggacgcccacggtgcatgaagagcaattcttcatacagccaatatagtccattatctcgactaaatgtgccgcagggtttccaggcccgttctaaacagtcgggggcgagaggttaaccggaagcacaacggttct

SEQ ID NO: 1313 - RNA, 237 nt, Synthetic construct
  source 1..237: mol_type = other RNA
gcgctcaatcgggggcgatcagttacgtgtttatactgtcaaggcttgtcccgaggtcagtgcaggacgcgagttcgatcattcgggctcctctcgccagccacgcgggccggctgcggtcagttcggcagcaccacactgccagctgcatgacagcatacgcgaccacgtcgaagacgaacgcacaccgcagaacggcgggggcggagatgacaagggtcagtgcgttgacctgaa

SEQ ID NO: 1314 - RNA, 268 nt, Synthetic construct
  source 1..268: mol_type = other RNA
gcctcacatatagatgtgagggagcggaacaggctgtcaagcccccagaatgtcataccagtagtaatacttatgatgatcatggtgaaggcgaccagcaaacgggtgatactcatgttgaacctcactgtaacgcggacattatatgtctctcctagcaataagcggccatacccgggaaaccggtggaaggtgtgaggagcattatggtttatccggccaagcgcatataggactgccgccatcctatgcttggccggttggctat

SEQ ID NO: 1315 - RNA, 281 nt, Synthetic construct
  source 1..281: mol_type = other RNA
gcttattcaatttgtggataaggtaatcaacagtatgtcaatagttgataacatttcataaagcgtttcagctactgaacataaactaataaagaatttgataatgattattgtcatattagattccttgtgagttataatagttgattgattattataatatatatttagcagatagcggtttattcgatgggtatcctaaggtacctaggctatataaagactgttaactattcaaatagttagggacaaccgcaatccttagtctttagttttgcttt

SEQ ID NO: 1316 - RNA, 281 nt, Synthetic construct
  source 1..281: mol_type = other RNA
gcttattcaatttgtggataaggtaatcaacagtatgtcaatagttgataacatttcataaagcgtttcagctactgaacataaactaataaagaatttgataatgattattgtcatattagattccttgtgagttataatagttgattgattattataatatatatttagcagatagcggtttattcgacgggtatcctaaggtacctaggctatataaagactgttaactattcaaatagttagggacaaccgcaatccttagtctttagttttgcttt

SEQ ID NO: 1317 - RNA, 263 nt, Synthetic construct
  source 1..263: mol_type = other RNA
gcttattcaatttgtggataaggtaatcaacagtatgtcaatagttgataacatttcataaagcgtttcagctactgaacataaactaataaagaatttgataatgattattgtcatattagattccttgtgagttataatagttgattgattattataatatatatttagcagatagcggtttattcgacgggtatcctaaggtacctaggctatctgttaactattcaaatagttagggacaaccgcaatccttagtcttt

SEQ ID NO: 1318 - RNA, 281 nt, Synthetic construct
  source 1..281: mol_type = other RNA
gccctaggtgaaggcttaggggtgatgtacagtttgtcaactctcggacagctaacttcgctgcaaaccgaccagagtatgaccaacaagtggacgatgctcataacggtctccataatactgattacattatacagtgtttctaacatttgcggtgaaatgcactatctgggctacttgtagttctatgtgtgtgagaaggttggataaagaccactttgttaagccggggcaatatttttctgaatgaccgcagttcgaaattgccccggtttcacaaa

SEQ ID NO: 1319 - RNA, 279 nt, Synthetic construct
  source 1..279: mol_type = other RNA
gcctaggtgaaggcttaggggtgatgtacagtttgtcaactctcggacagctaacttcgctgcaaaccgaccagagtatgaccaacaagtggacgatgctcataacggtctccataatactgattacattatacagtgtttctaacatttgcggtgaaatgcactatctgggctacttgtagttctatgtgtgtgagaaggttggataaagaccactttgttaagccggggcaatattttctgaatgaccgcagttcgaaattgccccggtttcacaaa

SEQ ID NO: 1320 - RNA, 302 nt, Synthetic construct
  source 1..302: mol_type = other RNA
gcctcataaaagtagttatgagggaaattggtgaacttcttgcaagccttatctcaattgtaacggtaagatttaccgagctaagtacaatcgataatgcttctaagtaacttggcatttggaaacctccattcgtcataagcaaccaattcagtatactaagtatagtataaactgttagtgagtttagtggcccatttataggttagaaatagtctgtaatttgaaaggagagtatgcttgcaagggtttcttaaaaagagtaataggctacgattacatacccttgttagctctaccag

SEQ ID NO: 1321 - RNA, 317 nt, Synthetic construct
  source 1..317: mol_type = other RNA
gctcattttgtagtaaatgaggttgtcagcagactgtcaaggtcattataggcttcgaaagttgccatagaccatgacagtattattaacaggaaacgcatggcatagactattgtcatgttcaactccttggtaattatatctgtttgattataattcatctttagcatattagcggtctgcgtaaaattgttgtcatgcaatagtatgcaaaatggtgctccttaattgagagtgcttggctatactgagggctgttaactacttaagttaagtagttagggactaccgcaatcctaagcccttagttttgcttt

SEQ ID NO: 1322 - RNA, 255 nt, Synthetic construct
  source 1..255: mol_type = other RNA
gcttacttatttaggaagtaaggtgtatcacaagctgtcaagtagaacgctcaccagtacactggctagcagacgacttgcatggccgcagatggctagtagactcatgtcgaacactcctgcgatgatggtatcatatatcatatctgacattcgtggccggcatcatttcgatgttgtgaatgcgtattaaacgtaccctaagcccggagaggaaaatggatgccactgtccaacctctctgggttttgcatt

SEQ ID NO: 1323 - RNA, 255 nt, Synthetic construct
  source 1..255: mol_type = other RNA
gcttacttatttaggaagtaaggtgtatcacaagctgtcaagtagaacgctcaccagtacactggctagcagacgacttgcatggccgcagatggctagtagactcacgtcgaacactcctgcgatgatggtatcatatatcatatctgacattcgtggccggcatcatttcgatgttgtgaatgcgtattaaacgtaccctaagcccggagaggaaaatggatgccactgtccaacctctctgggttttgcatt

SEQ ID NO: 1324 - RNA, 255 nt, Synthetic construct
  source 1..255: mol_type = other RNA
gcttacttatttaggaagtaaggtgtatcacaagctgtcaagtagaacgctcaccagtacactggctagcagacgacttgcatggccgcagatggctagtagactcacgtcgaacactcctgcgatgatggtatcatatatcatatctgacattcgtggccggcatcatttcgatgttgtgaatgcgtattaaacgtaccctaagcccggagaggaaaatggatgccaccgtccaacctctctgggttttgcatt

SEQ ID NO: 1325 - RNA, 315 nt, Synthetic construct
  source 1..315: mol_type = other RNA
gctcacttcatattagggagtggggttgtcagcagactgtcaaggtcattataggcttcgaaagttgccatagaccatgacagtattaccaacaggaaacgcatggcatagactattgtcataccgaactccttggtgattatatctgtttgattataattcatctttagcatattagcggtctgcgtaaaattgttgtcatacaatggtatgcaaaatggtgctccttaattgagggtgcttggctatactgagggctgttaactacttaagtggttagggactaccgcaatcctaagcccttagttttgcttt

SEQ ID NO: 1326 - RNA, 238 nt, Synthetic construct
  source 1..238: mol_type = other RNA
gaagggaaacctgggggagcggagaattacttgaagctgtcaagcccgaaggccgccagcaggtatgccatgatgtccatccggacctccaggtatagctggacgctcaaggtacatgacgagcaatcgtacatgcagccaatatagtccattatctcgaatacatgtgccgttagggtatttcatacctgtgctaaacagtcgggggcgaaaggttaactggaagcacaccggtcct

SEQ ID NO: 1327 - RNA, 238 nt, Synthetic construct
  source 1..238: mol_type = other RNA
gcgcccgattgggggtgtttcagttacgtgtttaaactgtcaaggccagtttcgcagccggtgcatgacgcgagttcgatcattcgggctcctctcgccagccacgcgggcggctttgcggcaatttggcaataccacattgccaggtgcttcacagtatacacgaccacgtcgaagacgaacgcacaccgcagaacggcgggggcggagatgttaagggtcggtgcgttgactcgat

SEQ ID NO: 1328 - RNA, 238 nt, Synthetic construct
  source 1..238: mol_type = other RNA
gcgcccaattgggggcgttccagtcacgtgtttaaactgtcaaggccagtttcgcagccggtgcaagacgcgagttcgatcattcgggctcctctcgccagccacgcgggcggctttgcggcaatccggcaataccacattgccaggtgcttcacagtatacacgaccacgtcgaagacgaacgcacaccgcagaacggcgggggcggagatgttaagggtcggtgcgttgacccgaa

SEQ ID NO: 1329 - RNA, 237 nt, Synthetic construct
  source 1..237: mol_type = other RNA
gcgctcaattgggggccttcagttacgtgtttaaactgtcaaggccagtttcgctgccggtgcagatcgcgagttcgatcattcgggctcctctcgccagccacgcgggcggctttgcggcaatccggcaataccacattgccagttgcttcacagtatacacgaccacgtcgaagacgaacgcacactgcagaacggcgggggcggagatgtcaagggtcggtgcgttgacctgat

SEQ ID NO: 1330 - RNA, 237 nt, Synthetic construct
  source 1..237: mol_type = other RNA
gcgctcaattgggggcgttcagttacgtgtttaaactgtcaaggccagtttcgcagccggtgcagatcgtgagttccagcatttgggctcctctcgccagccacgcgggcggctttgcggcagtccggcaataccacattgccagctgcttcacagtatacacgaccacgtcgaagacgaacgcacaccgcagaacggcgggggcggagatgttaagggtcagtgcgttgatctgat

SEQ ID NO: 1331 - RNA, 272 nt, Synthetic construct
  source 1..272: mol_type = other RNA
gcccagagatttaggctctgggggatactacaggatgtcaagcagaacttgatatttcaagcgaaacttgaacgctattgatattggaatgctgaacatacggtgatcctctgagatagttgtccgattactattagtatacgtgattgttaacactggcggctgcgtatcactctagggtacgtgatagtgcgatataagaagcactggtacatgccggcagggacagttaagagatggccgcagtctcgtgtccctgccggtttggctaa

SEQ ID NO: 1332 - RNA, 397 nt, Synthetic construct
  source 1..397: mol_type = other RNA
gccttatacgacatacggtgtaagggaagggtattattgtcaagagctgaacagcattctttcgaatatacattattgtattttcgactgctaatgcaatcatttcttgtgcaatgcacgcgataactccagtgaatacattcgtaagaatgctgttcagctgtattatttcaaccaataaaggaagaaagaagcagaattgttgaattatcatattaaatacctccatagttgtagttatatttattataacataattattgattaacgcagattttggacagttgatagccacatataacagctcgttcgagtaaaagtgaatattaagttaatcttatacccttgcagcaattttcggaacactgtcctccgtaagctgcgagggtattgcgat

SEQ ID NO: 1333 - RNA, 342 nt, Synthetic construct
  source 1..342: mol_type = other RNA
gccctggcgatctgcgtcaggggatggtgttgacggtgtcaagcgaccagttcgcgacggcttcgacgcatgcgcggatgacgcacatgccgagccgagcgacgatgttgctgagcactttcacgatgacctcctccgcgaggtcagcataacaccgcacgttggctgttgcgtcgcggcctgttggggccgtgagtatgtgtggcaaggatcgataggcggtttcgcgacacgctgttttgagctgagccgttggcgttcttcggagcgtcaaagacaccggggaggccctcgtccgcaaggaggggtatacgcacacccctgcttccccgggtttgccaa

SEQ ID NO: 1334 - RNA, 258 nt, Synthetic construct
  source 1..258: mol_type = other RNA
gcttagctcttgaggggctaaggtgtatcacaagctgtcaagggctacctgaaccatgaactggaacaggcgcttcttgaagctacagcagacggttaatagactcacgtcgaacactcctgacactatgatattatacatcatacctgacatttgtggcccagcgtctagcgctgtgaatgcgtaataaaatacgtttgttaagcctggatcgggaattggaaggccacaatcccttacctttccaggttttgcact

SEQ ID NO: 1335 - RNA, 251 nt, Synthetic construct
  source 1..251: mol_type = other RNA
gctttacgcgaaaggcgtgaagggctgtgacagattgtcaatgtatttatccttgcagaaccaagataaacacatcgtcatgaagcgtaagattaccattgtatagtctccatcgcagattacattatatatcatttctaatagatcgcggcgtgcgcctttcgaggccagatgattggttaggccagttagttaaagcccaagaggacacacggaaaggccgcatgtccactcctcttgggttttgctag

SEQ ID NO: 1336 - RNA, 305 nt, Synthetic construct
  source 1..305: mol_type = other RNA
gcctttggagtagttagtctagctcgcgaagggatgttgtttgaactgtccagcagtttgttaagagatattgtaataacgaagcgagccagaaaggctacgattagtttcaacaatatcaccacacagttggtcatcatacttcctccaatagtatagcatgttaagttttatgcgttagtcaaagatgttttttgacaaatttagtgctgggtttaagaaattaataacattttgaaccaaagtttgaagactccgtaagggcgtaacgtgagacgcgccacaagcccttgcggatctgctaa

SEQ ID NO: 1337 - RNA, 305 nt, Synthetic construct
  source 1..305: mol_type = other RNA
gcctttggagtggttagtctagctcgcgaagggatgttgtttgaactgtccagcagtttgttaagagatattgtaataacgaagcgagccagaaaggctacgattagtttcaacaatatcaccacacagttggtcatcatacttcctccaatagtatagcatgttaagttttatgcgttagtcaaagatgttttttgacaaatttagtgctgggtttaagaaattaataacgttttgaaccaaagtttgaagactccgtaggggcgtaacgtgagacgcgccacaagcccttgcggatctgctaa

SEQ ID NO: 1338 - RNA, 280 nt, Synthetic construct
  source 1..280: mol_type = other RNA
gccctaagtgtaggcttaggggtgatgtacagtttgtcgacttccggccagcgaccttcgttgcaaaccgaccagaggctgaccaacaggtggacgatgctcataacggtctccattaagctgattacattatacagtgtttctaacatttgcggtgaagtgcatacttggttcacttgtggatcagattgtatgagaaggttggataaagaccactttgttaagccggggcgacgtttttctggatgaccgcagttcgaagttgccccggtttcacaat

SEQ ID NO: 1339 - RNA, 261 nt, Synthetic construct
  source 1..261: mol_type = other RNA
gcttacttttttaggaagtaaggtgtatcacaagctgtcaagtagaacgctcaccagtacactggctagcagacgacttgcatggccgcagatggctagtagactcacgtcgaacactcctgcgatgatggtatcatatatcatatctgacattcgtggccgacatcatatcgatgttgtgaatgcgtatttaagtacgtttgttaagcccggattgggaatcggatggccacagtcctttacctttccgggttttgcaat

SEQ ID NO: 1340 - RNA, 275 nt, Synthetic construct
  source 1..275: mol_type = other RNA
gcctgcttctttaggaatcagggctgaatttgcaaagtaaagtttggctccggccaccgccgtcgccaactctactgtgagcaaagaccacagattcatctggacagggatgttcatggtgactctgaggttgatgtgttcattatacaacatggcatttgtttgcggcgctgaacggatggcaaggaccgttcggagaatggctcgggtggcgagccggtaaactggggaggggctagggattagccgcctccttctctccccagttaagccat

SEQ ID NO: 1341 - RNA, 275 nt, Synthetic construct
  source 1..275: mol_type = other RNA
gccttatctaatgagataagggaatatcacatgctgtcaagcagtacgatttccaagaacttggcaatcgcacaactggcaatactacacataatagtatttataacaataggcatattcagtcctccttgtgaaactgggtcgttgatattatagatcatatgtgacatatgagtggcacaggggctcacgcctctatgtatacgtaacaacgcgtttgtttagccctaaacggtataagatggccacagtctaaaccgtatagggttggcaat

SEQ ID NO: 1342 - RNA, 251 nt, Synthetic construct
  source 1..251: mol_type = other RNA
gctttacgcgaaaggcgtgaagggctgtgacagattgtcaatgactttatccttgcagagccaagataaacacattgtcatgaagcgtaagattaccattgtatagtctccatcgcagattacattatatatcatttctaatagatcgcggcgtgtgcctttaggggccagatgattggttaggccagttagttaaagcccaaagggatacacggaaaggccgcatgtccactccctttgggttttgctag

SEQ ID NO: 1343 - RNA, 289 nt, Synthetic construct
  source 1..289: mol_type = other RNA
gttgtattcatttgggaatgcataagggaagtttgaccttgtcaagcaaataatcactgagatggttcaacgctatattgcatagcaccaccactatccatgctgataactcgctgagcacggtaaattcaccccctatatcagtcgatataattcgattatatactaaatgtttcaatagggtccgtagtgcattatagatgtattatggtgcattgctattcttcatgtatgcttggggagcaagaacttgtaataggcccaattactgctccctcagctctgcaaa

SEQ ID NO: 1344 - RNA, 233 nt, Synthetic construct
  source 1..233: mol_type = other RNA
gtatgcctgaggggacggagaattacttgaagctgtcaagcccgaaagttgccagcagtatcgctatgatgtccacaaggacctccatgtgtacctggacgccgacggtgcatgaagagcaattcttcatacagccaatatagtccattatctcgactaaatgtgccgcagggttttacaggcccgttctaaacagtcgggggcgagaggctaactggaagcacaacggttct

SEQ ID NO: 1345 - RNA, 321 nt, Synthetic construct
  source 1..321: mol_type = other RNA
attctatataaatagatgtagaagtgatatgtttctcgcttgtcaagttgataaatatttatcacctcgccaagctcgtcggtgatcaccagaattgcgagtactagaaacgcttctggagcgccagacagccatatcagcaccttgattgcctcctcatggtaattatagtgtatcgttttaagagatcccattattttggatcagtggtcaacagagcgctcatttaatgtgagcgacaccaaattaggctaggaggtcttctgttatgaaacagagtgatggaccacgacaatcacatgacctttctagctcttctaa

SEQ ID NO: 1346 - RNA, 333 nt, Synthetic construct
  source 1..333: mol_type = other RNA
gtctcataaaaatagttatgagagagataggtttcatgcttggcaagtttcttaacgttaagaacctcaccaagctgccatatgatttctagatacagtaacagtagttgcaggtctggcaagtcagtcaaacttatcacagttgtaattaccaccttaatgtaattataattgagtgttttaaagattttcgcttttaacaaagtgaaatatagtggtcagcagagcatttattcttatgaataaatgacacaacattaggctaggaggttgttctgttatgaaacggagtaagggaccacgacgattacataaccttcctagctcttctaa

SEQ ID NO: 1347 - RNA, 269 nt, Synthetic construct
  source 1..269: mol_type = other RNA
gcccatggcaattcggtcatggggtatgttgcaggatgtcaagcccttcggttattccgagcaggatacttgccatccgccagccgagaatgatgattgcattcatagtaatgtgacctccttcaggctgcaccaagacatgatactccatgtctagcacgtggcggcgcgcgaaagatgatgacgcggaaggtagcgagagctaccaagttatgccgggaaggggcctatcggatggccgcagtctgatcccttcccggtttggctaa

SEQ ID NO: 1348 - RNA, 236 nt, Synthetic construct
  source 1..236: mol_type = other RNA
gatgggaaacttgggggtgcggagaatagcttgaagctgtcaagcccgaaggttgccagcagtagtgtaaagatgtccattcggacctccgcacgaaattggacaatcaaggcgcatgaagagaatatcttcacgcagctactatagtccataatctcgattatatgtgccaaagggtgatatagacccgcattaaacagttgggggcaggaggttaaccggaagcacacggttct

SEQ ID NO: 1349 - RNA, 236 nt, Synthetic construct
  source 1..236: mol_type = other RNA
gatgggaaacttgggggtgcggagaatagcttgaagctgtcaagcccgaaggttgccagcagtagtgtaaagatgtccattcggacctccgcacgaaattggacaatcaaggcgcatgaagagaatatcttcacgcagctactatagtccataatctcgattatatgtgccaaagggtgatatagacccgcattaaacagtcgggggcaggaggttaaccggaagcacacggttct

SEQ ID NO: 1350 - RNA, 236 nt, Synthetic construct
  source 1..236: mol_type = other RNA
gatgggaaacttgggggtgcggagaatagcttgaagctgtcaagcccgaaggttgccagcagtagtgtaaagatgtccattcggacctccgcatgaaattggacaatcaaggcgcatgaagagaatatcttcacgcagctactatagtccataatctcgattatatgtgccaaagggtgatatagacccgcattaaacagtcgggggcaggaggttaaccggaagcacacggttct

SEQ ID NO: 1351 - RNA, 236 nt, Synthetic construct
  source 1..236: mol_type = other RNA
gatgggaaacttgggggtgcggagaatagcttgaagctgtcaagcccgaaggttgccagcagtattgtaaagatgtccattcggacctccgcacgaaactggacaatcaaggcgcatgaagagaatatcttcacgcagctactatagtccataatctcgattatatgtgccaaagggtgatatagacccgcattaaacagtcgggggcaggaggttaaccggaagcacacggttct

SEQ ID NO: 1352 - RNA, 330 nt, Synthetic construct
  source 1..330: mol_type = other RNA
gttctgtgaaaatagttgcagaagtgttaagtttcacgcttgtcaaggttataaatatttagaacctcaacaagcaaactagtaacttctatcaagaacagcactagctggacttctagattgctagacaaacttagcaacattgtaattacctccatagggtgagtatagtgtaatgttttaagagtaagaattccgttatatgcgggagcgcgtggtcagcagagcattcatctacggatggatgacaccaaattaggctaggaggttttctgttatgaaatggagtaatgggccacaacaattacataacctctctagctcttctaa

SEQ ID NO: 1353 - RNA, 271 nt, Synthetic construct
  source 1..271: mol_type = other RNA
gccctacgtatagacgtaggggtgatgtacagtttggcaactcccggccagcgaccttcgctgaacaccgaccagaggctgactaacaggtggacgatactcataacggtctccatcacgctgattacattatacagtgtttctaacatttgcggtgaaatggacgtaactttagggttaccgtacatgagaaggttggaagaaccaatttgttaagccggggtatgagttgttggatgaccgcagttcaatcgtaccccggtttcacaaa

SEQ ID NO: 1354 - RNA, 281 nt, Synthetic construct
  source 1..281: mol_type = other RNA
gccctaagcaacggcttaggggtgatgtacagtttgtcaactctctcgtagcaaccctcgcggtattgccaccagaagctgaataacaagtggacgatgctcataacggcctccatgatcctgattacattatacagtgtttctaacatttgcggtgaaatgcactatcgaactatttataggtcaatatgtgtgtgagaaggttggataaaaaccactttgttaagccggggcaatgttttctgaacgaccgcagttcaaagttgctccggtttcacaat

SEQ ID NO: 1355 - RNA, 241 nt, Synthetic construct
  source 1..241: mol_type = other RNA
gccttgatagatcggtatcaggggtatgtcacaggatgtcaagccatccggccatgccgggcaaacttgaccactgaacttggaatctcagcctcatggttgtctctaggtaactgtacgacattgctaacacgcgtggctacgcgacctcgtgtcgcaagatggtgatgagttatcactcggttaagccggggagggtggtaaagattgccacggtcttatccctcctcggttttgctac

SEQ ID NO: 1356 - RNA, 282 nt, Synthetic construct
  source 1..282: mol_type = other RNA
gctttcaataagtgatataagttcatcacttgattggaaggagcttaacagctcgtcaaagctgaatgatgcgctcacaagagccgccatccagagtgacgagacgatacggaacggtatccacacaggaacctccaaagtaatagttaaagtgtaactcatatctaacatgacgcggctacataggcttatgcctataagaaggttgtatttacaacttagttaagccgaggcaaggcgttttgaattgccgcagttctaagtctgcctcggttttgctag

SEQ ID NO: 1357 - RNA, 305 nt, Synthetic construct
  source 1..305: mol_type = other RNA
gcctttggagtagttagtctagctcgcgaagggatgttgtttgaactgtccagcagtttgttaagagatattgtaataacgaagcgagccagaaaggctacgattagtttcaacaatatcaccacacagttggtcatcatacttcctccaatagtatagcatgttaagttttatgcgttagtcaaagatgttttttgacaaatttagtgctgggtttaagaaattaataacgttttgaaccaaagtttgaagactccgtaagggcgtaacgtgagacgcgccacaagcccttgcggatctgctaa

SEQ ID NO: 1358 - RNA, 308 nt, Synthetic construct
  source 1..308: mol_type = other RNA
gcctttggagtaggtcgcctagctcgcaaagggagacagtttgaactgtcaagcagtttgttaagaagtattgtaataatgaacctagccattaaggcaatccatggtttcaacactaacagtatcattagcaagtggtttgtgatcatactagctccaatagtatagcatgttaagtttaatgcgtttgtcaaagctgtttttttgactaaattaagtgctgggtttaagaagtttttgaaccaaagtttaaagactccgtaagggcgtaacgtgagacgcgccacaagcccttacggatctgctaa

SEQ ID NO: 1359 - RNA, 288 nt, Synthetic construct
  source 1..288: mol_type = other RNA
gcttctagatttaggctggaagggagagtgtttagaatcgggacaaccgttctggtgccggtaacgttaccagcacccagaactatgttcagaagctcattcagttcgccgaaacaaaggctgagccggacagagaacactaaagcagttacaattgattcccatttcattgtagttgtggttattaagttaaatctaaggcggtctgagaaatactgtgaagtatttctctaaaattagttgtgcggggagggctaatggttccgccgaccaggcccaaccctttaa

SEQ ID NO: 1360 - RNA, 258 nt, Synthetic construct
  source 1..258: mol_type = other RNA
gcttacttttttgggaagtaaggtgtatcacaagctgtcaagtagaatacgaaccagaatactggcgagcagacgacttgcatagccgcagatgactagtagattcatatcgaacactcctgcgatgatgatagcatatatcatatctgacattcgtggccggcatctttgatgttgtgaatgcgtacctagtgcgttccctaagcccggagaggatactggatggccacagtcctttacctttccgggttttgcatt

SEQ ID NO: 1361 - RNA, 236 nt, Synthetic construct
  source 1..236: mol_type = other RNA
gcccagaagggcgggtgccagttacgtgtttaaactgtcaaggccagcttccgggccggtgcagatcgcgagttccatcgtttgggctcctctcgccagccacgcgggcggctttgcggcaacccggcaacaccacgctgccaggtgcgctacagtgtacacgaccacgtcgaagacgaacgcacaccgcagaacggcgggggcggagatgccaagggtcagtgcgttgatccaat

SEQ ID NO: 1362 - RNA, 248 nt, Synthetic construct
  source 1..248: mol_type = other RNA
gctccatgtattgacatggaggagtgttacaagttgtcaacttcgcccagctgcagccaagccaggacaagtgataacagagtgacgacgggattccgcaaggacacctccagttgcatgtgagcatggtacgacatttctaacatacgcggtttggcccctacgggtgtaaaggtaagaggattacttggtctatccgggagagcggttttcagattgccgccatcttcgctctctcggtttgctag

SEQ ID NO: 1363 - RNA, 302 nt, Synthetic construct
  source 1..302: mol_type = other RNA
gcttattctgattttgggaataaggaattcagtaaactgtcaagttctacgcaggcctctagacccgcgtaaagcaatgacacgactatcaacaggaaacgaatggcataatttgtcatagtgacctctctggttgactgataataaatcatctctagtatgtagcggtccgcataaagccgtattaacacggtgatatgtaaaatggcgcttctttctcaaaaaagagagtgtcggctatactaagaggctaaactgaaaacagttaggatcaccgcaatcccgcctcttagttttgctaa

SEQ ID NO: 1364 - RNA, 301 nt, Synthetic construct
  source 1..301: mol_type = other RNA
gcctcataaaagtagttatgagggaaattggtgaatttctgtcaagctttatctcaattgtaatcataatacttatccagtcgattacaatcgataacgcttctgaataacttggcatttggatacctccaatcgtcataaacaaccaatttaatatactgattatagtataagctattagtgcattcagtagcctctttataggctagcaatggtctataattcgaaaggagagtatgctagcagggtttttgatagagagtaataggctacgattacatacccctgctagctctgccaa

SEQ ID NO: 1365 - RNA, 312 nt, Synthetic construct
  source 1..312: mol_type = other RNA
gcctttggagtagccaatctagctagctcgcagagggatgttgtttgaactgtccagcagtagatttagagaagttataataacaaagcgagccacactggctacgatttgttgcaataatatcactacatagttgttggtcatcatactacctccaatagtatagcatgttaagttttatgcgttagtcaaagatgttttttgacaaatctagtgctgggtttaataaagtaataacgttttaaaccaaagtttaaagactccgtaagggtgtaacgtgtgacgcgccacaagcccttgcggatctgctaa

SEQ ID NO: 1366 - RNA, 276 nt, Synthetic construct; identical to SEQ ID NO: 975
  source 1..276: mol_type = other RNA

SEQ ID NO: 1367 - RNA, 276 nt, Synthetic construct; identical to SEQ ID NO: 975
  source 1..276: mol_type = other RNA

SEQ ID NO: 1368 - RNA, 276 nt, Synthetic construct; identical to SEQ ID NO: 977
  source 1..276: mol_type = other RNA

SEQ ID NO: 1369 - RNA, 276 nt, Synthetic construct; identical to SEQ ID NO: 979
  source 1..276: mol_type = other RNA

SEQ ID NO: 1370 - RNA, 276 nt, Synthetic construct; identical to SEQ ID NO: 981
  source 1..276: mol_type = other RNA

SEQ ID NO: 1371 - RNA, 283 nt, Synthetic construct; identical to SEQ ID NO: 982
  source 1..283: mol_type = other RNA

SEQ ID NO: 1372 - RNA, 276 nt, Synthetic construct; identical to SEQ ID NO: 984
  source 1..276: mol_type = other RNA

SEQ ID NO: 1373 - RNA, 281 nt, Synthetic construct; identical to SEQ ID NO: 986
  source 1..281: mol_type = other RNA

SEQ ID NO: 1374 - RNA, 283 nt, Synthetic construct; identical to SEQ ID NO: 834
  source 1..283: mol_type = other RNA

SEQ ID NO: 1375 - RNA, 273 nt, Synthetic construct; identical to SEQ ID NO: 988
  source 1..273: mol_type = other RNA

SEQ ID NO: 1376 - RNA, 276 nt, Synthetic construct; identical to SEQ ID NO: 993
  source 1..276: mol_type = other RNA

SEQ ID NO: 1377 - RNA, 276 nt, Synthetic construct; identical to SEQ ID NO: 984
  source 1..276: mol_type = other RNA

SEQ ID NO: 1378 - RNA, 276 nt, Synthetic construct; identical to SEQ ID NO: 984
  source 1..276: mol_type = other RNA

SEQ ID NO: 1379 - RNA, 276 nt, Synthetic construct; identical to SEQ ID NO: 996
  source 1..276: mol_type = other RNA

SEQ ID NO: 1380 - RNA, 276 nt, Synthetic construct; identical to SEQ ID NO: 997
  source 1..276: mol_type = other RNA

SEQ ID NO: 1381 - RNA, 281 nt, Synthetic construct; identical to SEQ ID NO: 827
  source 1..281: mol_type = other RNA

SEQ ID NO: 1382 - RNA, 273 nt, Synthetic construct; identical to SEQ ID NO: 1001
  source 1..273: mol_type = other RNA

SEQ ID NO: 1383 - RNA, 276 nt, Synthetic construct; identical to SEQ ID NO: 981
  source 1..276: mol_type = other RNA

SEQ ID NO: 1384 - RNA, 276 nt, Synthetic construct; identical to SEQ ID NO: 981
  source 1..276: mol_type = other RNA

SEQ ID NO: 1385 - RNA, 276 nt, Synthetic construct; identical to SEQ ID NO: 975
  source 1..276: mol_type = other RNA

SEQ ID NO: 1386 - RNA, 276 nt, Synthetic construct; identical to SEQ ID NO: 975
  source 1..276: mol_type = other RNA

SEQ ID NO: 1387 - RNA, 276 nt, Synthetic construct; identical to SEQ ID NO: 996
  source 1..276: mol_type = other RNA

SEQ ID NO: 1388 - RNA, 276 nt, Synthetic construct; identical to SEQ ID NO: 975
  source 1..276: mol_type = other RNA

SEQ ID NO: 1389 - RNA, 267 nt, Synthetic construct; identical to SEQ ID NO: 832
  source 1..267: mol_type = other RNA

SEQ ID NO: 1390 - RNA, 281 nt, Synthetic construct; identical to SEQ ID NO: 827
  source 1..281: mol_type = other RNA

SEQ ID NO: 1391 - RNA, 281 nt, Synthetic construct; identical to SEQ ID NO: 827
  source 1..281: mol_type = other RNA

SEQ ID NO: 1392 - RNA, 281 nt, Synthetic construct; identical to SEQ ID NO: 827
  source 1..281: mol_type = other RNA

SEQ ID NO: 1393 - RNA, 276 nt, Synthetic construct; identical to SEQ ID NO: 996
  source 1..276: mol_type = other RNA

SEQ ID NO: 1394 - RNA, 273 nt, Synthetic construct; identical to SEQ ID NO: 988
  source 1..273: mol_type = other RNA

SEQ ID NO: 1395 - RNA, 276 nt, Synthetic construct; identical to SEQ ID NO: 993
  source 1..276: mol_type = other RNA

SEQ ID NO: 1396 - RNA, 276 nt, Synthetic construct; identical to SEQ ID NO: 993
  source 1..276: mol_type = other RNA

SEQ ID NO: 1397 - RNA, 281 nt, Synthetic construct; identical to SEQ ID NO: 1009
  source 1..281: mol_type = other RNA

SEQ ID NO: 1398 - RNA, 281 nt, Synthetic construct; identical to SEQ ID NO: 827
  source 1..281: mol_type = other RNA

SEQ ID NO: 1399 - RNA, 281 nt, Synthetic construct; identical to SEQ ID NO: 827
  source 1..281: mol_type = other RNA

SEQ ID NO: 1400 - RNA, 281 nt, Synthetic construct; identical to SEQ ID NO: 827
  source 1..281: mol_type = other RNA

SEQ ID NO: 1401 - RNA, 251 nt, Synthetic construct; identical to SEQ ID NO: 1020
  source 1..251: mol_type = other RNA

SEQ ID NO: 1402 - RNA, 251 nt, Synthetic construct; identical to SEQ ID NO: 1020
  source 1..251: mol_type = other RNA

SEQ ID NO: 1403 - RNA, 281 nt, Synthetic construct; identical to SEQ ID NO: 1027
  source 1..281: mol_type = other RNA

SEQ ID NO: 1404 - RNA, 251 nt, Synthetic construct; identical to SEQ ID NO: 1022
  source 1..251: mol_type = other RNA

SEQ ID NO: 1405 - RNA, 279 nt, Synthetic construct; identical to SEQ ID NO: 1018
  source 1..279: mol_type = other RNA

SEQ ID NO: 1406 - RNA, 279 nt, Synthetic construct; identical to SEQ ID NO: 1018
  source 1..279: mol_type = other RNA

SEQ ID NO: 1407 - RNA, 281 nt, Synthetic construct; identical to SEQ ID NO: 1027
  source 1..281: mol_type = other RNA

SEQ ID NO: 1408 - RNA, 245 nt, Synthetic construct; identical to SEQ ID NO: 1036
  source 1..245: mol_type = other RNA

SEQ ID NO: 1409 - RNA, 245 nt, Synthetic construct; identical to SEQ ID NO: 1036
  source 1..245: mol_type = other RNA

SEQ ID NO: 1410 - RNA, 245 nt, Synthetic construct; identical to SEQ ID NO: 1036
  source 1..245: mol_type = other RNA

SEQ ID NO: 1411 - RNA, 245 nt, Synthetic construct; identical to SEQ ID NO: 1036
  source 1..245: mol_type = other RNA

SEQ ID NO: 1412 - RNA, 279 nt, Synthetic construct; identical to SEQ ID NO: 1038
  source 1..279: mol_type = other RNA

SEQ ID NO: 1413 - RNA, 251 nt, Synthetic construct; identical to SEQ ID NO: 1037
  source 1..251: mol_type = other RNA

SEQ ID NO: 1414 - RNA, 263 nt, Synthetic construct; identical to SEQ ID NO: 1044
  source 1..263: mol_type = other RNA

SEQ ID NO: 1415 - RNA, 280 nt, Synthetic construct; identical to SEQ ID NO: 1049
  source 1..280: mol_type = other RNA

SEQ ID NO: 1416 - RNA, 280 nt, Synthetic construct; identical to SEQ ID NO: 1049
  source 1..280: mol_type = other RNA

SEQ ID NO: 1417 - RNA, 283 nt, Synthetic construct; identical to SEQ ID NO: 1067
  source 1..283: mol_type = other RNA

SEQ ID NO: 1418 - RNA, 270 nt, Synthetic construct; identical to SEQ ID NO: 1070
  source 1..270: mol_type = other RNA

SEQ ID NO: 1419 - RNA, 254 nt, Synthetic construct; identical to SEQ ID NO: 1071
  source 1..254: mol_type = other RNA

SEQ ID NO: 1420 - RNA, 267 nt, Synthetic construct; identical to SEQ ID NO: 1072
  source 1..267: mol_type = other RNA

SEQ ID NO: 1421 - RNA, 281 nt, Synthetic construct; identical to SEQ ID NO: 827
  source 1..281: mol_type = other RNA

SEQ ID NO: 1422 - RNA, 281 nt, Synthetic construct; identical to SEQ ID NO: 827
  source 1..281: mol_type = other RNA

SEQ ID NO: 1423 - RNA, 261 nt, Synthetic construct; identical to SEQ ID NO: 1076
  source 1..261: mol_type = other RNA

SEQ ID NO: 1424 - RNA, 261 nt, Synthetic construct; identical to SEQ ID NO: 1076
  source 1..261: mol_type = other RNA

SEQ ID NO: 1425 - RNA, 261 nt, Synthetic construct; identical to SEQ ID NO: 1076
  source 1..261: mol_type = other RNA

SEQ ID NO: 1426 - RNA, 261 nt, Synthetic construct; identical to SEQ ID NO: 1077
  source 1..261: mol_type = other RNA

SEQ ID NO: 1427 - RNA, 282 nt, Synthetic construct; identical to SEQ ID NO: 1084
  source 1..282: mol_type = other RNA

SEQ ID NO: 1428 - RNA, 280 nt, Synthetic construct; identical to SEQ ID NO: 1049
  source 1..280: mol_type = other RNA

SEQ ID NO: 1429 - RNA, 280 nt, Synthetic construct; identical to SEQ ID NO: 1049
  source 1..280: mol_type = other RNA

SEQ ID NO: 1430 - RNA, 281 nt, Synthetic construct; identical to SEQ ID NO: 1088
  source 1..281: mol_type = other RNA

SEQ ID NO: 1431 - RNA, 281 nt, Synthetic construct; identical to SEQ ID NO: 1090
  source 1..281: mol_type = other RNA

SEQ ID NO: 1432 - RNA, 282 nt, Synthetic construct; identical to SEQ ID NO: 1092
  source 1..282: mol_type = other RNA

SEQ ID NO: 1433 - RNA, 273 nt, Synthetic construct; identical to SEQ ID NO: 1093
  source 1..273: mol_type = other RNA

SEQ ID NO: 1434 - RNA, 257 nt, Synthetic construct; identical to SEQ ID NO: 1052
  source 1..257: mol_type = other RNA

SEQ ID NO: 1435 - RNA, 309 nt, Synthetic construct; identical to SEQ ID NO: 1043
  source 1..309: mol_type = other RNA

SEQ ID NO: 1436 - RNA, 309 nt, Synthetic construct; identical to SEQ ID NO: 1043
  source 1..309: mol_type = other RNA

SEQ ID NO: 1437 - RNA, 281 nt, Synthetic construct; identical to SEQ ID NO: 827
  source 1..281: mol_type = other RNA

SEQ ID NO: 1438 - RNA, 257 nt, Synthetic construct; identical to SEQ ID NO: 1099
  source 1..257: mol_type = other RNA

SEQ ID NO: 1439 - RNA, 250 nt, Synthetic construct; identical to SEQ ID NO: 1101
  source 1..250: mol_type = other RNA

SEQ ID NO: 1440 - RNA, 267 nt, Synthetic construct; identical to SEQ ID NO: 1106
  source 1..267: mol_type = other RNA

SEQ ID NO: 1441 - RNA, 267 nt, Synthetic construct; identical to SEQ ID NO: 832
  source 1..267: mol_type = other RNA

SEQ ID NO: 1442 - RNA, 261 nt, Synthetic construct; identical to SEQ ID NO: 1108
  source 1..261: mol_type = other RNA

SEQ ID NO: 1443 - RNA, 269 nt, Synthetic construct; identical to SEQ ID NO: 1110
  source 1..269: mol_type = other RNA

SEQ ID NO: 1444 - RNA, 270 nt, Synthetic construct; identical to SEQ ID NO: 1112
  source 1..270: mol_type = other RNA

SEQ ID NO: 1445 - RNA, 270 nt, Synthetic construct; identical to SEQ ID NO: 1112
  source 1..270: mol_type = other RNA

SEQ ID NO: 1446 - RNA, 270 nt, Synthetic construct; identical to SEQ ID NO: 1113
  source 1..270: mol_type = other RNA

SEQ ID NO: 1447 - RNA, 261 nt, Synthetic construct; identical to SEQ ID NO: 1100
  source 1..261: mol_type = other RNA

SEQ ID NO: 1448 - RNA, 261 nt, Synthetic construct; identical to SEQ ID NO: 1100
  source 1..261: mol_type = other RNA

SEQ ID NO: 1449 - RNA, 276 nt, Synthetic construct; identical to SEQ ID NO: 981
  source 1..276: mol_type = other RNA

SEQ ID NO: 1450 - RNA, 276 nt, Synthetic construct; identical to SEQ ID NO: 981
  source 1..276: mol_type = other RNA

SEQ ID NO: 1451 - RNA, 276 nt, Synthetic construct; identical to SEQ ID NO: 981
  source 1..276: mol_type = other RNA

SEQ ID NO: 1452 - RNA, 309 nt, Synthetic construct; identical to SEQ ID NO: 1043
  source 1..309: mol_type = other RNA

SEQ ID NO: 1453 - RNA, 309 nt, Synthetic construct; identical to SEQ ID NO: 1043
  source 1..309: mol_type = other RNA

SEQ ID NO: 1454 - RNA, 309 nt, Synthetic construct; identical to SEQ ID NO: 1043
  source 1..309: mol_type = other RNA

SEQ ID NO: 1455 - RNA, 257 nt, Synthetic construct
  source 1..257: mol_type = other RNA
gcccatgatatatggtcatggggttatcaaatacattgtcaaatctttctttggaacaatagatccaatagaatgatcctgaaagcaattggcataagatgcatcgtaaagcttccatatgcgattctcctattacgattgttaagataatatataagattgttaatatatgcggtttcgatggttatatcgtatagcttgcttctaaccttagaacataaatgatggccgcaatcacaagttctaaggttgacaag

SEQ ID NO: 1456 - RNA, 264 nt, Synthetic construct; identical to SEQ ID NO: 1103
  source 1..264: mol_type = other RNA

SEQ ID NO: 1457 - RNA, 288 nt, Synthetic construct; identical to SEQ ID NO: 1131
  source 1..288: mol_type = other RNA

SEQ ID NO: 1458 - RNA, 260 nt, Synthetic construct; identical to SEQ ID NO: 831
  source 1..260: mol_type = other RNA

SEQ ID NO: 1459 - RNA, 267 nt, Synthetic construct; identical to SEQ ID NO: 1134
  source 1..267: mol_type = other RNA

SEQ ID NO: 1460 - RNA, 267 nt, Synthetic construct; identical to SEQ ID NO: 1135
  source 1..267: mol_type = other RNA

SEQ ID NO: 1461 - RNA, 267 nt, Synthetic construct; identical to SEQ ID NO: 1135
  source 1..267: mol_type = other RNA

SEQ ID NO: 1462 - RNA, 267 nt, Synthetic construct; identical to SEQ ID NO: 1136
  source 1..267: mol_type = other RNA

SEQ ID NO: 1463 - RNA, 280 nt, Synthetic construct; identical to SEQ ID NO: 1049
  source 1..280: mol_type = other RNA

SEQ ID NO: 1464 - RNA, 280 nt, Synthetic construct; identical to SEQ ID NO: 1049
  source 1..280: mol_type = other RNA

SEQ ID NO: 1465 - RNA, 280 nt, Synthetic construct; identical to SEQ ID NO: 1138
  source 1..280: mol_type = other RNA

SEQ ID NO: 1466 - RNA, 261 nt, Synthetic construct; identical to SEQ ID NO: 1139
  source 1..261: mol_type = other RNA

SEQ ID NO: 1467 - RNA, 273 nt, Synthetic construct; identical to SEQ ID NO: 988
  source 1..273: mol_type = other RNA

SEQ ID NO: 1468 - RNA, 273 nt, Synthetic construct; identical to SEQ ID NO: 988
  source 1..273: mol_type = other RNA

SEQ ID NO: 1469 - RNA, 278 nt, Synthetic construct; identical to SEQ ID NO: 830
  source 1..278: mol_type = other RNA

SEQ ID NO: 1470 - RNA, 310 nt, Synthetic construct
  source 1..310: mol_type = other RNA
gccattcgtgaagtcgaatgggaaattgactgaatgtcaaccccgcgttgaggctgagtttccactggatattcatatccacgagataacctccttgatgatggcgttgatgattcgcatcccttggaacgtgattccaatgcttgcctctgtgtcattataacacatcttgaactgtgcaggattacaagcgcatggccttgcatctgcaaggtgttgtggctgaaaggcacccttcccgagggtccggtcaatgccgaaagagcgattatgggacgatccgaatcctatgctctttcggttttgccaa

SEQ ID NO: 1471 - RNA, 276 nt, Synthetic construct; identical to SEQ ID NO: 975
  source 1..276: mol_type = other RNA

SEQ ID NO: 1472 - RNA, 276 nt, Synthetic construct; identical to SEQ ID NO: 975
  source 1..276: mol_type = other RNA

SEQ ID NO: 1473 - RNA, 280 nt, Synthetic construct; identical to SEQ ID NO: 1049
  source 1..280: mol_type = other RNA

SEQ ID NO: 1474 - RNA, 282 nt, Synthetic construct; identical to SEQ ID NO: 1150
  source 1..282: mol_type = other RNA

SEQ ID NO: 1475 - RNA, 281 nt, Synthetic construct; identical to SEQ ID NO: 1151
  source 1..281: mol_type = other RNA

SEQ ID NO: 1476 - RNA, 280 nt, Synthetic construct; identical to SEQ ID NO: 1049
  source 1..280: mol_type = other RNA

SEQ ID NO: 1477 - RNA, 280 nt, Synthetic construct; identical to SEQ ID NO: 1049
  source 1..280: mol_type = other RNA

SEQ ID NO: 1478 - RNA, 280 nt, Synthetic construct; identical to SEQ ID NO: 1157
  source 1..280: mol_type = other RNA

SEQ ID NO: 1479 - RNA, 280 nt, Synthetic construct; identical to SEQ ID NO: 1049
  source 1..280: mol_type = other RNA

SEQ ID NO: 1480 - RNA, 258 nt, Synthetic construct; identical to SEQ ID NO: 1159
  source 1..258: mol_type = other RNA

SEQ ID NO: 1481 - RNA, 247 nt, Synthetic construct; identical to SEQ ID NO: 1162
  source 1..247: mol_type = other RNA

SEQ ID NO: 1482 - RNA, 281 nt, Synthetic construct; identical to SEQ ID NO: 1144
  source 1..281: mol_type = other RNA

SEQ ID NO: 1483 - RNA, 280 nt, Synthetic construct; identical to SEQ ID NO: 1049
  source 1..280: mol_type = other RNA

SEQ ID NO: 1484 - RNA, 282 nt, Synthetic construct; identical to SEQ ID NO: 1166
  source 1..282: mol_type = other RNA

SEQ ID NO: 1485 - RNA, 247 nt, Synthetic construct; identical to SEQ ID NO: 1168
  source 1..247: mol_type = other RNA

SEQ ID NO: 1486 - RNA, 247 nt, Synthetic construct; identical to SEQ ID NO: 1169
  source 1..247: mol_type = other RNA

SEQ ID NO: 1487 - RNA, 280 nt, Synthetic construct; identical to SEQ ID NO: 1170
  source 1..280: mol_type = other RNA

SEQ ID NO: 1488 - RNA, 247 nt, Synthetic construct; identical to SEQ ID NO: 1171
  source 1..247: mol_type = other RNA

SEQ ID NO: 1489 - RNA, 247 nt, Synthetic construct; identical to SEQ ID NO: 1169
  source 1..247: mol_type = other RNA

SEQ ID NO: 1490 - RNA, 247 nt, Synthetic construct; identical to SEQ ID NO: 1169
  source 1..247: mol_type = other RNA

SEQ ID NO: 1491 - RNA, 274 nt, Synthetic construct; identical to SEQ ID NO: 1172
  source 1..274: mol_type = other RNA

SEQ ID NO: 1492 - RNA, 247 nt, Synthetic construct; identical to SEQ ID NO: 1178
  source 1..247: mol_type = other RNA

SEQ ID NO: 1493 - RNA, 280 nt, Synthetic construct; identical to SEQ ID NO: 1049
  source 1..280: mol_type = other RNA

SEQ ID NO: 1494 - RNA, 280 nt, Synthetic construct; identical to SEQ ID NO: 1179
  source 1..280: mol_type = other RNA

SEQ ID NO: 1495 - RNA, 271 nt, Synthetic construct; identical to SEQ ID NO: 1180
  source 1..271: mol_type = other RNA

SEQ ID NO: 1496 - RNA, 280 nt, Synthetic construct; identical to SEQ ID NO: 1049
  source 1..280: mol_type = other RNA

SEQ ID NO: 1497 - RNA, 280 nt, Synthetic construct; identical to SEQ ID NO: 1049
  source 1..280: mol_type = other RNA

SEQ ID NO: 1498 - RNA, 280 nt, Synthetic construct; identical to SEQ ID NO: 1049
  source 1..280: mol_type = other RNA

SEQ ID NO: 1499 - RNA, 280 nt, Synthetic construct; identical to SEQ ID NO: 1049
  source 1..280: mol_type = other RNA

SEQ ID NO: 1500 - RNA, 280 nt, Synthetic construct; identical to SEQ ID NO: 1049
  source 1..280: mol_type = other RNA

SEQ ID NO: 1501 - RNA, 280 nt, Synthetic construct; identical to SEQ ID NO: 1049
  source 1..280: mol_type = other RNA

SEQ ID NO: 1502 - RNA, 280 nt, Synthetic construct; identical to SEQ ID NO: 1049
  source 1..280: mol_type = other RNA

SEQ ID NO: 1503 - RNA, 280 nt, Synthetic construct; identical to SEQ ID NO: 1182
  source 1..280: mol_type = other RNA

SEQ ID NO: 1504 - RNA, 278 nt, Synthetic construct; identical to SEQ ID NO: 1183
  source 1..278: mol_type = other RNA

SEQ ID NO: 1505 - RNA, 280 nt, Synthetic construct; identical to SEQ ID NO: 1182
  source 1..280: mol_type = other RNA

SEQ ID NO: 1506 - RNA, 280 nt, Synthetic construct; identical to SEQ ID NO: 1182
  source 1..280: mol_type = other RNA

SEQ ID NO: 1507 - RNA, 263 nt, Synthetic construct; identical to SEQ ID NO: 1191
  source 1..263: mol_type = other RNA

SEQ ID NO: 1508 - RNA, 282 nt, Synthetic construct; identical to SEQ ID NO: 1192
  source 1..282: mol_type = other RNA

SEQ ID NO: 1509 - RNA, 263 nt, Synthetic construct; identical to SEQ ID NO: 1194
  source 1..263: mol_type = other RNA

SEQ ID NO: 1510 - RNA, 271 nt, Synthetic construct; identical to SEQ ID NO: 1016
  source 1..271: mol_type = other RNA

SEQ ID NO: 1511 - RNA, 282 nt, Synthetic construct; identical to SEQ ID NO: 1190
  source 1..282: mol_type = other RNA

SEQ ID NO: 1512 - RNA, 280 nt, Synthetic construct; identical to SEQ ID NO: 1049
  source 1..280: mol_type = other RNA

SEQ ID NO: 1513 - RNA, 280 nt, Synthetic construct; identical to SEQ ID NO: 1049
  source 1..280: mol_type = other RNA

SEQ ID NO: 1514 - RNA, 276 nt, Synthetic construct; identical to SEQ ID NO: 1204
  source 1..276: mol_type = other RNA

SEQ ID NO: 1515 - RNA, 280 nt, Synthetic construct; identical to SEQ ID NO: 1205
  source 1..280: mol_type = other RNA

SEQ ID NO: 1516 - RNA, 280 nt, Synthetic construct; identical to SEQ ID NO: 1205
  source 1..280: mol_type = other RNA

SEQ ID NO: 1517 - RNA, 247 nt, Synthetic construct; identical to SEQ ID NO: 1178
  source 1..247: mol_type = other RNA

SEQ ID NO: 1518 - RNA, 258 nt, Synthetic construct; identical to SEQ ID NO: 1207
  source 1..258: mol_type = other RNA

SEQ ID NO: 1519 - RNA, 280 nt, Synthetic construct; identical to SEQ ID NO: 1205
  source 1..280: mol_type = other RNA

SEQ ID NO: 1520 - RNA, 251 nt, Synthetic construct; identical to SEQ ID NO: 1022
  source 1..251: mol_type = other RNA

SEQ ID NO: 1521 - RNA, 251 nt, Synthetic construct; identical to SEQ ID NO: 1022
  source 1..251: mol_type = other RNA

SEQ ID NO: 1522 - RNA, 280 nt, Synthetic construct; identical to SEQ ID NO: 1205
  source 1..280: mol_type = other RNA

SEQ ID NO: 1523 - RNA, 251 nt, Synthetic construct; identical to SEQ ID NO: 1022
  source 1..251: mol_type = other RNA

SEQ ID NO: 1524 - RNA, 251 nt, Synthetic construct; identical to SEQ ID NO: 1022
  source 1..251: mol_type = other RNA

SEQ ID NO: 1525 - RNA, 251 nt, Synthetic construct; identical to SEQ ID NO: 1022
  source 1..251: mol_type = other RNA

SEQ ID NO: 1526 - RNA, 251 nt, Synthetic construct; identical to SEQ ID NO: 1020
  source 1..251: mol_type = other RNA

SEQ ID NO: 1527 - RNA, 279 nt, Synthetic construct; identical to SEQ ID NO: 1030
  source 1..279: mol_type = other RNA

SEQ ID NO: 1528 - RNA, 251 nt, Synthetic construct; identical to SEQ ID NO: 1022
  source 1..251: mol_type = other RNA

SEQ ID NO: 1529 - RNA, 251 nt, Synthetic construct; identical to SEQ ID NO: 1022
  source 1..251: mol_type = other RNA

SEQ ID NO: 1530 - RNA, 251 nt, Synthetic construct; identical to SEQ ID NO: 1020
  source 1..251: mol_type = other RNA

SEQ ID NO: 1531 - RNA, 251 nt, Synthetic construct; identical to SEQ ID NO: 1020
  source 1..251: mol_type = other RNA

SEQ ID NO: 1532 - RNA, 280 nt, Synthetic construct; identical to SEQ ID NO: 1205
  source 1..280: mol_type = other RNA

SEQ ID NO: 1533 - RNA, 251 nt, Synthetic construct; identical to SEQ ID NO: 1020
  source 1..251: mol_type = other RNA

SEQ ID NO: 1534 - RNA, 251 nt, Synthetic construct; identical to SEQ ID NO: 1020
  source 1..251: mol_type = other RNA

SEQ ID NO: 1535 - RNA, 251 nt, Synthetic construct; identical to SEQ ID NO: 1020
  source 1..251: mol_type = other RNA

SEQ ID NO: 1536 - RNA, 251 nt, Synthetic construct; identical to SEQ ID NO: 1022
  source 1..251: mol_type = other RNA

SEQ ID NO: 1537 - RNA, 281 nt, Synthetic construct; identical to SEQ ID NO: 827
  source 1..281: mol_type = other RNA

SEQ ID NO: 1538 - RNA, 281 nt, Synthetic construct; identical to SEQ ID NO: 827
  source 1..281: mol_type = other RNA

SEQ ID NO: 1539 - RNA, 251 nt, Synthetic construct; identical to SEQ ID NO: 1024
  source 1..251: mol_type = other RNA

SEQ ID NO: 1540 - RNA, 251 nt, Synthetic construct; identical to SEQ ID NO: 1024
  source 1..251: mol_type = other RNA

SEQ ID NO: 1541 - RNA, 251 nt, Synthetic construct; identical to SEQ ID NO: 1020
  source 1..251: mol_type = other RNA

SEQ ID NO: 1542 - RNA, 281 nt, Synthetic construct; identical to SEQ ID NO: 827
  source 1..281: mol_type = other RNA

SEQ ID NO: 1543 - RNA, 281 nt, Synthetic construct; identical to SEQ ID NO: 827
  source 1..281: mol_type = other RNA

SEQ ID NO: 1544 - RNA, 280 nt, Synthetic construct; identical to SEQ ID NO: 1217
  source 1..280: mol_type = other RNA

SEQ ID NO: 1545 - RNA, 280 nt, Synthetic construct; identical to SEQ ID NO: 1217
  source 1..280: mol_type = other RNA

SEQ ID NO: 1546 - RNA, 281 nt, Synthetic construct; identical to SEQ ID NO: 827
  source 1..281: mol_type = other RNA

SEQ ID NO: 1547 - RNA, 261 nt, Synthetic construct; identical to SEQ ID NO: 1218
  source 1..261: mol_type = other RNA

SEQ ID NO: 1548 - RNA, 270 nt, Synthetic construct; identical to SEQ ID NO: 1112
  source 1..270: mol_type = other RNA

SEQ ID NO: 1549 - RNA, 270 nt, Synthetic construct; identical to SEQ ID NO: 1220
  source 1..270: mol_type = other RNA

SEQ ID NO: 1550 - RNA, 283 nt, Synthetic construct; identical to SEQ ID NO: 1067
  source 1..283: mol_type = other RNA

SEQ ID NO: 1551 - RNA, 283 nt, Synthetic construct; identical to SEQ ID NO: 1067
  source 1..283: mol_type = other RNA

SEQ ID NO: 1552 - RNA, 270 nt, Synthetic construct; identical to SEQ ID NO: 1112
  source 1..270: mol_type = other RNA

SEQ ID NO: 1553 - RNA, 270 nt, Synthetic construct; identical to SEQ ID NO: 1112
  source 1..270: mol_type = other RNA

SEQ ID NO: 1554 - RNA, 261 nt, Synthetic construct; identical to SEQ ID NO: 1079
  source 1..261: mol_type = other RNA

SEQ ID NO: 1555 - RNA, 270 nt, Synthetic construct; identical to SEQ ID NO: 1112
  source 1..270: mol_type = other RNA

SEQ ID NO: 1556 - RNA, 270 nt, Synthetic construct; identical to SEQ ID NO: 1220
  source 1..270: mol_type = other RNA

SEQ ID NO: 1557 - RNA, 270 nt, Synthetic construct; identical to SEQ ID NO: 1220
  source 1..270: mol_type = other RNA

SEQ ID NO: 1558 - RNA, 268 nt, Synthetic construct; identical to SEQ ID NO: 1019
  source 1..268: mol_type = other RNA

SEQ ID NO: 1559 - RNA, 268 nt, Synthetic construct; identical to SEQ ID NO: 1019
  source 1..268: mol_type = other RNA

SEQ ID NO: 1560 - RNA, 261 nt, Synthetic construct; identical to SEQ ID NO: 1079
  source 1..261: mol_type = other RNA

SEQ ID NO: 1561 - RNA, 261 nt, Synthetic construct; identical to SEQ ID NO: 1079
  source 1..261: mol_type = other RNA

SEQ ID NO: 1562 - RNA, 281 nt, Synthetic construct; identical to SEQ ID NO: 1221
  source 1..281: mol_type = other RNA

SEQ ID NO: 1563 - RNA, 283 nt, Synthetic construct; identical to SEQ ID NO: 1222
  source 1..283: mol_type = other RNA

SEQ ID NO: 1564 - RNA, 253 nt, Synthetic construct; identical to SEQ ID NO: 1063
  source 1..253: mol_type = other RNA

SEQ ID NO: 1565 - RNA, 250 nt, Synthetic construct; identical to SEQ ID NO: 1225
  source 1..250: mol_type = other RNA

SEQ ID NO: 1566 - RNA, 261 nt, Synthetic construct; identical to SEQ ID NO: 1076
  source 1..261: mol_type = other RNA

SEQ ID NO: 1567 - RNA, 261 nt, Synthetic construct; identical to SEQ ID NO: 1076
  source 1..261: mol_type = other RNA

SEQ ID NO: 1568 - RNA, 251 nt, Synthetic construct; identical to SEQ ID NO: 1227
  source 1..251: mol_type = other RNA

SEQ ID NO: 1569 - RNA, 261 nt, Synthetic construct; identical to SEQ ID NO: 1228
  source 1..261: mol_type = other RNA

SEQ ID NO: 1570 - RNA, 251 nt, Synthetic construct; identical to SEQ ID NO: 1230
  source 1..251: mol_type = other RNA

SEQ ID NO: 1571 - RNA, 270 nt, Synthetic construct; identical to SEQ ID NO: 1113
  source 1..270: mol_type = other RNA

SEQ ID NO: 1572 - RNA, 270 nt, Synthetic construct; identical to SEQ ID NO: 1113
  source 1..270: mol_type = other RNA

SEQ ID NO: 1573 - RNA, 270 nt, Synthetic construct; identical to SEQ ID NO: 1112
  source 1..270: mol_type = other RNA

SEQ ID NO: 1574 - RNA, 252 nt, Synthetic construct; identical to SEQ ID NO: 1232
  source 1..252: mol_type = other RNA

SEQ ID NO: 1575 - RNA, 252 nt, Synthetic construct; identical to SEQ ID NO: 1233
  source 1..252: mol_type = other RNA

SEQ ID NO: 1576 - RNA, 283 nt, Synthetic construct; identical to SEQ ID NO: 1067
  source 1..283: mol_type = other RNA

SEQ ID NO: 1577 - RNA, 283 nt, Synthetic construct; identical to SEQ ID NO: 1067
  source 1..283: mol_type = other RNA

SEQ ID NO: 1578 - RNA, 252 nt, Synthetic construct; identical to SEQ ID NO: 1234
  source 1..252: mol_type = other RNA

SEQ ID NO: 1579 - RNA, 283 nt, Synthetic construct; identical to SEQ ID NO: 1235
  source 1..283: mol_type = other RNA

SEQ ID NO: 1580 - RNA, 268 nt, Synthetic construct; identical to SEQ ID NO: 1237
  source 1..268: mol_type = other RNA

SEQ ID NO: 1581 - RNA, 267 nt, Synthetic construct; identical to SEQ ID NO: 1238
  source 1..267: mol_type = other RNA

SEQ ID NO: 1582 - RNA, 266 nt, Synthetic construct; identical to SEQ ID NO: 1240
  source 1..266: mol_type = other RNA

SEQ ID NO: 1583 - RNA, 267 nt, Synthetic construct; identical to SEQ ID NO: 1241
  source 1..267: mol_type = other RNA

SEQ ID NO: 1584 - RNA, 286 nt, Synthetic construct; identical to SEQ ID NO: 1243
  source 1..286: mol_type = other RNA

SEQ ID NO: 1585 - RNA, 280 nt, Synthetic construct; identical to SEQ ID NO: 1244
  source 1..280: mol_type = other RNA

SEQ ID NO: 1586 - RNA, 261 nt, Synthetic construct; identical to SEQ ID NO: 1139
  source 1..261: mol_type = other RNA

SEQ ID NO: 1587 - RNA, 261 nt, Synthetic construct; identical to SEQ ID NO: 1139
  source 1..261: mol_type = other RNA

SEQ ID NO: 1588 - RNA, 261 nt, Synthetic construct; identical to SEQ ID NO: 1139
  source 1..261: mol_type = other RNA

SEQ ID NO: 1589 - RNA, 261 nt, Synthetic construct; identical to SEQ ID NO: 1076
  source 1..261: mol_type = other RNA

SEQ ID NO: 1590 - RNA, 261 nt, Synthetic construct; identical to SEQ ID NO: 1076
  source 1..261: mol_type = other RNA

SEQ ID NO: 1591 - RNA, 261 nt, Synthetic construct; identical to SEQ ID NO: 1079
  source 1..261: mol_type = other RNA

SEQ ID NO: 1592 - RNA, 261 nt, Synthetic construct; identical to SEQ ID NO: 1100
  source 1..261: mol_type = other RNA

SEQ ID NO: 1593 - RNA, 261 nt, Synthetic construct; identical to SEQ ID NO: 1250
  source 1..261: mol_type = other RNA

SEQ ID NO: 1594 - RNA, 261 nt, Synthetic construct; identical to SEQ ID NO: 1100
  source 1..261: mol_type = other RNA

SEQ ID NO: 1595 - RNA, 261 nt, Synthetic construct; identical to SEQ ID NO: 1100
  source 1..261: mol_type = other RNA

SEQ ID NO: 1596 - RNA, 269 nt, Synthetic construct; identical to SEQ ID NO: 1255
  source 1..269: mol_type = other RNA

SEQ ID NO: 1597 - RNA, 288 nt, Synthetic construct; identical to SEQ ID NO: 1145
  source 1..288: mol_type = other RNA

SEQ ID NO: 1598 - RNA, 282 nt, Synthetic construct; identical to SEQ ID NO: 1190
  source 1..282: mol_type = other RNA

SEQ ID NO: 1599 - RNA, 282 nt, Synthetic construct; identical to SEQ ID NO: 1190
  source 1..282: mol_type = other RNA

SEQ ID NO: 1600 - RNA, 279 nt, Synthetic construct; identical to SEQ ID NO: 1259
  source 1..279: mol_type = other RNA

SEQ ID NO: 1601 - RNA, 251 nt, Synthetic construct; identical to SEQ ID NO: 1230
  source 1..251: mol_type = other RNA

SEQ ID NO: 1602 - RNA, 280 nt, Synthetic construct; identical to SEQ ID NO: 1205
  source 1..280: mol_type = other RNA

SEQ ID NO: 1603 - RNA, 280 nt, Synthetic construct; identical to SEQ ID NO: 1205
  source 1..280: mol_type = other RNA

SEQ ID NO: 1604 - RNA, 279 nt, Synthetic construct; identical to SEQ ID NO: 1263
  source 1..279: mol_type = other RNA

SEQ ID NO: 1605 - RNA, 251 nt, Synthetic construct; identical to SEQ ID NO: 1022
  source 1..251: mol_type = other RNA

SEQ ID NO: 1606 - RNA, 251 nt, Synthetic construct; identical to SEQ ID NO: 1022
  source 1..251: mol_type = other RNA

SEQ ID NO: 1607 - RNA, 245 nt, Synthetic construct; identical to SEQ ID NO: 1267
  source 1..245: mol_type = other RNA

SEQ ID NO: 1608 - RNA, 280 nt, Synthetic construct; identical to SEQ ID NO: 1205
  source 1..280: mol_type = other RNA

SEQ ID NO: 1609 - RNA, 267 nt, Synthetic construct; identical to SEQ ID NO: 1268
  source 1..267: mol_type = other RNA

SEQ ID NO: 1610 - RNA, 279 nt, Synthetic construct; identical to SEQ ID NO: 1030
  source 1..279: mol_type = other RNA

SEQ ID NO: 1611 - RNA, 281 nt, Synthetic construct; identical to SEQ ID NO: 1201
  source 1..281: mol_type = other RNA

SEQ ID NO: 1612 - RNA, 278 nt, Synthetic construct; identical to SEQ ID NO: 1033
  source 1..278: mol_type = other RNA

SEQ ID NO: 1613 - RNA, 278 nt, Synthetic construct; identical to SEQ ID NO: 1033
  source 1..278: mol_type = other RNA

SEQ ID NO: 1614 - RNA, 270 nt, Synthetic construct; identical to SEQ ID NO: 1113
  source 1..270: mol_type = other RNA

SEQ ID NO: 1615 - RNA, 270 nt, Synthetic construct; identical to SEQ ID NO: 1113
  source 1..270: mol_type = other RNA

SEQ ID NO: 1616 - RNA, 270 nt, Synthetic construct; identical to SEQ ID NO: 1113
  source 1..270: mol_type = other RNA

SEQ ID NO: 1617 - RNA, 251 nt, Synthetic construct; identical to SEQ ID NO: 1269
  source 1..251: mol_type = other RNA

SEQ ID NO: 1618 - RNA, 252 nt, Synthetic construct; identical to SEQ ID NO: 1270
  source 1..252: mol_type = other RNA

SEQ ID NO: 1619 - RNA, 251 nt, Synthetic construct; identical to SEQ ID NO: 1215
  source 1..251: mol_type = other RNA

SEQ ID NO: 1620 - RNA, 280 nt, Synthetic construct; identical to SEQ ID NO: 1205
  source 1..280: mol_type = other RNA

SEQ ID NO: 1621 - RNA, 280 nt, Synthetic construct; identical to SEQ ID NO: 1205
  source 1..280: mol_type = other RNA

SEQ ID NO: 1622 - RNA, 280 nt, Synthetic construct; identical to SEQ ID NO: 1205
  source 1..280: mol_type = other RNA

SEQ ID NO: 1623 - RNA, 280 nt, Synthetic construct; identical to SEQ ID NO: 1205
  source 1..280: mol_type = other RNA

SEQ ID NO: 1624 - RNA, 280 nt, Synthetic construct; identical to SEQ ID NO: 1205
  source 1..280: mol_type = other RNA

SEQ ID NO: 1625 - RNA, 280 nt, Synthetic construct; identical to SEQ ID NO: 1205
  source 1..280: mol_type = other RNA

SEQ ID NO: 1626 - RNA, 268 nt, Synthetic construct; identical to SEQ ID NO: 1276
  source 1..268: mol_type = other RNA

SEQ ID NO: 1627 - RNA, 280 nt, Synthetic construct; identical to SEQ ID NO: 1205
  source 1..280: mol_type = other RNA

SEQ ID NO: 1628 - RNA, 262 nt, Synthetic construct; identical to SEQ ID NO: 1278
  source 1..262: mol_type = other RNA

SEQ ID NO: 1629 - RNA, 251 nt, Synthetic construct; identical to SEQ ID NO: 1279
  source 1..251: mol_type = other RNA

SEQ ID NO: 1630 - RNA, 279 nt, Synthetic construct; identical to SEQ ID NO: 1281
  source 1..279: mol_type = other RNA

SEQ ID NO: 1631 - RNA, 252 nt, Synthetic construct; identical to SEQ ID NO: 1282
  source 1..252: mol_type = other RNA

SEQ ID NO: 1632 - RNA, 279 nt, Synthetic construct; identical to SEQ ID NO: 1259
  source 1..279: mol_type = other RNA

SEQ ID NO: 1633 - RNA, 281 nt, Synthetic construct; identical to SEQ ID NO: 827
  source 1..281: mol_type = other RNA

SEQ ID NO: 1634 - RNA, 247 nt, Synthetic construct; identical to SEQ ID NO: 1285
  source 1..247: mol_type = other RNA

SEQ ID NO: 1635 - RNA, 261 nt, Synthetic construct; identical to SEQ ID NO: 1228
  source 1..261: mol_type = other RNA

SEQ ID NO: 1636 - RNA, 261 nt, Synthetic construct; identical to SEQ ID NO: 1228
  source 1..261: mol_type = other RNA

SEQ ID NO: 1637 - RNA, 280 nt, Synthetic construct; identical to SEQ ID NO: 1138
  source 1..280: mol_type = other RNA

SEQ ID NO: 1638 - RNA, 280 nt, Synthetic construct; identical to SEQ ID NO: 1138
  source 1..280: mol_type = other RNA

SEQ ID NO: 1639 - RNA, 261 nt, Synthetic construct; identical to SEQ ID NO: 1228
  source 1..261: mol_type = other RNA

SEQ ID NO: 1640 - RNA, 258 nt, Synthetic construct; identical to SEQ ID NO: 1286
  source 1..258: mol_type = other RNA

SEQ ID NO: 1641 - RNA, 279 nt, Synthetic construct; identical to SEQ ID NO: 1028
  source 1..279: mol_type = other RNA

SEQ ID NO: 1642 - RNA, 279 nt, Synthetic construct; identical to SEQ ID NO: 1028
  source 1..279: mol_type = other RNA

SEQ ID NO: 1643 - RNA, 280 nt, Synthetic construct; identical to SEQ ID NO: 1287
  source 1..280: mol_type = other RNA

SEQ ID NO: 1644 - RNA, 279 nt, Synthetic construct; identical to SEQ ID NO: 1030
  source 1..279: mol_type = other RNA

SEQ ID NO: 1645 - RNA, 279 nt, Synthetic construct; identical to SEQ ID NO: 1030
  source 1..279: mol_type = other RNA

SEQ ID NO: 1646 - RNA, 246 nt, Synthetic construct; identical to SEQ ID NO: 1291
  source 1..246: mol_type = other RNA

SEQ ID NO: 1647 - RNA, 267 nt, Synthetic construct; identical to SEQ ID NO: 1294
  source 1..267: mol_type = other RNA

SEQ ID NO: 1648 - RNA, 278 nt, Synthetic construct; identical to SEQ ID NO: 1295
  source 1..278: mol_type = other RNA

SEQ ID NO: 1649 - RNA, 280 nt, Synthetic construct; identical to SEQ ID NO: 1298
  source 1..280: mol_type = other RNA

SEQ ID NO: 1650 - RNA, 263 nt, Synthetic construct; identical to SEQ ID NO: 1194
  source 1..263: mol_type = other RNA

SEQ ID NO: 1651 - RNA, 281 nt, Synthetic construct; identical to SEQ ID NO: 1027
  source 1..281: mol_type = other RNA

SEQ ID NO: 1652 - RNA, 281 nt, Synthetic construct; identical to SEQ ID NO: 1027
  source 1..281: mol_type = other RNA

SEQ ID NO: 1653 - RNA, 251 nt, Synthetic construct; identical to SEQ ID NO: 1020
  source 1..251: mol_type = other RNA

SEQ ID NO: 1654 - RNA, 281 nt, Synthetic construct; identical to SEQ ID NO: 1277
  source 1..281: mol_type = other RNA

SEQ ID NO: 1655 - RNA, 261 nt, Synthetic construct; identical to SEQ ID NO: 1100
  source 1..261: mol_type = other RNA

SEQ ID NO: 1656 - RNA, 261 nt, Synthetic construct; identical to SEQ ID NO: 1202
  source 1..261: mol_type = other RNA

SEQ ID NO: 1657 - RNA, 264 nt, Synthetic construct; identical to SEQ ID NO: 1306
  source 1..264: mol_type = other RNA

SEQ ID NO: 1658 - RNA, 264 nt, Synthetic construct; identical to SEQ ID NO: 1306
  source 1..264: mol_type = other RNA

SEQ ID NO: 1659 - RNA, 269 nt, Synthetic construct; identical to SEQ ID NO: 1310
  source 1..269: mol_type = other RNA

SEQ ID NO: 1660 - RNA, 269 nt, Synthetic construct; identical to SEQ ID NO: 1311
  source 1..269: mol_type = other RNA

SEQ ID NO: 1661 - RNA, 261 nt, Synthetic construct; identical to SEQ ID NO: 1079
  source 1..261: mol_type = other RNA

SEQ ID NO: 1662 - RNA, 268 nt, Synthetic construct; identical to SEQ ID NO: 1314
  source 1..268: mol_type = other RNA

SEQ ID NO: 1663 - RNA, 281 nt, Synthetic construct; identical to SEQ ID NO: 1277
  source 1..281: mol_type = other RNA

SEQ ID NO: 1664 - RNA, 281 nt, Synthetic construct; identical to SEQ ID NO: 1277
  source 1..281: mol_type = other RNA

SEQ ID NO: 1665 - RNA, 315 nt, Synthetic construct; identical to SEQ ID NO: 1127
  source 1..315: mol_type = other RNA

SEQ ID NO: 1666 - RNA, 315 nt, Synthetic construct; identical to SEQ ID NO: 1127
  source 1..315: mol_type = other RNA

SEQ ID NO: 1667 - RNA, 315 nt, Synthetic construct; identical to SEQ ID NO: 1127
  source 1..315: mol_type = other RNA

SEQ ID NO: 1668 - RNA, 315 nt, Synthetic construct; identical to SEQ ID NO: 1325
  source 1..315: mol_type = other RNA

SEQ ID NO: 1669 - RNA, 281 nt, Synthetic construct; identical to SEQ ID NO: 1318
  source 1..281: mol_type = other RNA

SEQ ID NO: 1670 - RNA, 261 nt, Synthetic construct; identical to SEQ ID NO: 1202
  source 1..261: mol_type = other RNA

SEQ ID NO: 1671 - RNA, 261 nt, Synthetic construct; identical to SEQ ID NO: 1077
  source 1..261: mol_type = other RNA

SEQ ID NO: 1672 - RNA, 281 nt, Synthetic construct; identical to SEQ ID NO: 1031
  source 1..281: mol_type = other RNA

SEQ ID NO: 1673 - RNA, 261 nt, Synthetic construct; identical to SEQ ID NO: 1079
  source 1..261: mol_type = other RNA

SEQ ID NO: 1674 - RNA, 291 nt, Synthetic construct; identical to SEQ ID NO: 1124
  source 1..291: mol_type = other RNA

SEQ ID NO: 1675 - RNA, 291 nt, Synthetic construct; identical to SEQ ID NO: 1124
  source 1..291: mol_type = other RNA

SEQ ID NO: 1676 - RNA, 292 nt, Synthetic construct; identical to SEQ ID NO: 1125
  source 1..292: mol_type = other RNA

SEQ ID NO: 1677 - RNA, 292 nt, Synthetic construct; identical to SEQ ID NO: 1125
  source 1..292: mol_type = other RNA

SEQ ID NO: 1678 - RNA, 251 nt, Synthetic construct; identical to SEQ ID NO: 1342
  source 1..251: mol_type = other RNA

SEQ ID NO: 1679 - RNA, 269 nt, Synthetic construct; identical to SEQ ID NO: 1347
  source 1..269: mol_type = other RNA

SEQ ID NO: 1680 - RNA, 271 nt, Synthetic construct; identical to SEQ ID NO: 1353
  source 1..271: mol_type = other RNA

SEQ ID NO: 1681 - RNA, 281 nt, Synthetic construct; identical to SEQ ID NO: 1354
  source 1..281: mol_type = other RNA

SEQ ID NO: 1682 - RNA, 281 nt, Synthetic construct; identical to SEQ ID NO: 1031
  source 1..281: mol_type = other RNA

SEQ ID NO: 1683 - RNA, 281 nt, Synthetic construct; identical to SEQ ID NO: 1031
  source 1..281: mol_type = other RNA

SEQ ID NO: 1684 - RNA, 282 nt, Synthetic construct; identical to SEQ ID NO: 1356
  source 1..282: mol_type = other RNA

SEQ ID NO: 1685 - RNA, 258 nt, Synthetic construct; identical to SEQ ID NO: 1360
  source 1..258: mol_type = other RNA

SEQ ID NO: 1686 - RNA, 258 nt, Synthetic construct; identical to SEQ ID NO: 1360
  source 1..258: mol_type = other RNA

SEQ ID NO: 1687 - RNA, 268 nt, Synthetic construct; identical to SEQ ID NO: 1307
  source 1..268: mol_type = other RNA

SEQ ID NO: 1688 - RNA, 261 nt, Synthetic construct; identical to SEQ ID NO: 1079
  source 1..261: mol_type = other RNA

SEQ ID NO: 1689 - RNA, 261 nt, Synthetic construct; identical to SEQ ID NO: 1100
  source 1..261: mol_type = other RNA

SEQ ID NO: 1690 - RNA, 261 nt, Synthetic construct; identical to SEQ ID NO: 1100
  source 1..261: mol_type = other RNA

SEQ ID NO: 1691 - RNA, 261 nt, Synthetic construct; identical to SEQ ID NO: 1228
  source 1..261: mol_type = other RNA

SEQ ID NO: 1692 - RNA, 302 nt, Synthetic construct; identical to SEQ ID NO: 1363
  source 1..302: mol_type = other RNA

SEQ ID NO: 1693 - RNA, 261 nt, Synthetic construct; identical to SEQ ID NO: 1076
  source 1..261: mol_type = other RNA

SEQ ID NO: 1694 - RNA, 199 nt, Synthetic construct; identical to SEQ ID NO: 983
  source 1..199: mol_type = other RNA

SEQ ID NO: 1695 - RNA, 212 nt, Synthetic construct; identical to SEQ ID NO: 985
  source 1..212: mol_type = other RNA

SEQ ID NO: 1696 - RNA, 232 nt, Synthetic construct; identical to SEQ ID NO: 989
  source 1..232: mol_type = other RNA

SEQ ID NO: 1697 - RNA, 240 nt, Synthetic construct; identical to SEQ ID NO: 1000
  source 1..240: mol_type = other RNA

SEQ ID NO: 1698 - RNA, 238 nt, Synthetic construct; identical to SEQ ID NO: 1002
  source 1..238: mol_type = other RNA

SEQ ID NO: 1699 - RNA, 274 nt, Synthetic construct; identical to SEQ ID NO: 999
  source 1..274: mol_type = other RNA

SEQ ID NO: 1700 - RNA, 344 nt, Synthetic construct; identical to SEQ ID NO: 1004
  source 1..344: mol_type = other RNA

SEQ ID NO: 1701 - RNA, 302 nt, Synthetic construct; identical to SEQ ID NO: 990
  source 1..302: mol_type = other RNA

SEQ ID NO: 1702 - RNA, 236 nt, Synthetic construct; identical to SEQ ID NO: 1040
  source 1..236: mol_type = other RNA

SEQ ID NO: 1703 - RNA, 277 nt, Synthetic construct; identical to SEQ ID NO: 1046
  source 1..277: mol_type = other RNA

SEQ ID NO: 1704 - RNA, 237 nt, Synthetic construct; identical to SEQ ID NO: 1051
  source 1..237: mol_type = other RNA

SEQ ID NO: 1705 - RNA, 255 nt, Synthetic construct; identical to SEQ ID NO: 1048
  source 1..255: mol_type = other RNA

SEQ ID NO: 1706 - RNA, 302 nt, Synthetic construct; identical to SEQ ID NO: 1066
  source 1..302: mol_type = other RNA

SEQ ID NO: 1707 - RNA, 302 nt, Synthetic construct; identical to SEQ ID NO: 1066
  source 1..302: mol_type = other RNA

SEQ ID NO: 1708 - RNA, 320 nt, Synthetic construct; identical to SEQ ID NO: 1075
  source 1..320: mol_type = other RNA

SEQ ID NO: 1709 - RNA, 249 nt, Synthetic construct; identical to SEQ ID NO: 1082
  source 1..249: mol_type = other RNA

SEQ ID NO: 1710 - RNA, 248 nt, Synthetic construct; identical to SEQ ID NO: 1083
  source 1..248: mol_type = other RNA

SEQ ID NO: 1711 - RNA, 249 nt, Synthetic construct; identical to SEQ ID NO: 1095
  source 1..249: mol_type = other RNA

SEQ ID NO: 1712 - RNA, 236 nt, Synthetic construct; identical to SEQ ID NO: 1097
  source 1..236: mol_type = other RNA

SEQ ID NO: 1713 - RNA, 229 nt, Synthetic construct; identical to SEQ ID NO: 1057
  source 1..229: mol_type = other RNA

SEQ ID NO: 1714 - RNA, 238 nt, Synthetic construct; identical to SEQ ID NO: 1058
  source 1..238: mol_type = other RNA

SEQ ID NO: 1715 - RNA, 238 nt, Synthetic construct; identical to SEQ ID NO: 1116
  source 1..238: mol_type = other RNA

SEQ ID NO: 1716 - RNA, 246 nt, Synthetic construct; identical to SEQ ID NO: 1059
  source 1..246: mol_type = other RNA

SEQ ID NO: 1717 - RNA, 200 nt, Synthetic construct; identical to SEQ ID NO: 1119
  source 1..200: mol_type = other RNA

SEQ ID NO: 1718 - RNA, 200 nt, Synthetic construct; identical to SEQ ID NO: 1120
  source 1..200: mol_type = other RNA

SEQ ID NO: 1719 - RNA, 309 nt, Synthetic construct; identical to SEQ ID NO: 1123
  source 1..309: mol_type = other RNA

SEQ ID NO: 1720 - RNA, 249 nt, Synthetic construct; identical to SEQ ID NO: 1130
  source 1..249: mol_type = other RNA

SEQ ID NO: 1721 - RNA, 243 nt, Synthetic construct; identical to SEQ ID NO: 1140
  source 1..243: mol_type = other RNA

SEQ ID NO: 1722 - RNA, 284 nt, Synthetic construct; identical to SEQ ID NO: 1149
  source 1..284: mol_type = other RNA

SEQ ID NO: 1723 - RNA, 293 nt, Synthetic construct; identical to SEQ ID NO: 1137
  source 1..293: mol_type = other RNA

SEQ ID NO: 1724 - RNA, 330 nt, Synthetic construct; identical to SEQ ID NO: 1154
  source 1..330: mol_type = other RNA

SEQ ID NO: 1725 - RNA, 254 nt, Synthetic construct; identical to SEQ ID NO: 1160
  source 1..254: mol_type = other RNA

SEQ ID NO: 1726 - RNA, 227 nt, Synthetic construct; identical to SEQ ID NO: 1161
  source 1..227: mol_type = other RNA

SEQ ID NO: 1727 - RNA, 330 nt, Synthetic construct; identical to SEQ ID NO: 1163
  source 1..330: mol_type = other RNA

SEQ ID NO: 1728 - RNA, 238 nt, Synthetic construct; identical to SEQ ID NO: 1165
  source 1..238: mol_type = other RNA

SEQ ID NO: 1729 - RNA, 238 nt, Synthetic construct; identical to SEQ ID NO: 1165
  source 1..238: mol_type = other RNA

SEQ ID NO: 1730 - RNA, 236 nt, Synthetic construct; identical to SEQ ID NO: 1167
  source 1..236: mol_type = other RNA

SEQ ID NO: 1731 - RNA, 206 nt, Synthetic construct; identical to SEQ ID NO: 1174
  source 1..206: mol_type = other RNA

SEQ ID NO: 1732 - RNA, 302 nt, Synthetic construct; identical to SEQ ID NO: 1184
  source 1..302: mol_type = other RNA

SEQ ID NO: 1733 - RNA, 235 nt, Synthetic construct; identical to SEQ ID NO: 1185
  source 1..235: mol_type = other RNA

SEQ ID NO: 1734 - RNA, 235 nt, Synthetic construct; identical to SEQ ID NO: 1173
  source 1..235: mol_type = other RNA

SEQ ID NO: 1735 - RNA, 302 nt, Synthetic construct; identical to SEQ ID NO: 1014
  source 1..302: mol_type = other RNA

SEQ ID NO: 1736 - RNA, 254 nt, Synthetic construct; identical to SEQ ID NO: 1208
  source 1..254: mol_type = other RNA

SEQ ID NO: 1737 - RNA, 293 nt, Synthetic construct; identical to SEQ ID NO: 1209
  source 1..293: mol_type = other RNA

SEQ ID NO: 1738 - RNA, 309 nt, Synthetic construct; identical to SEQ ID NO: 1219
  source 1..309: mol_type = other RNA

SEQ ID NO: 1739 - RNA, 309 nt, Synthetic construct; identical to SEQ ID NO: 1219
  source 1..309: mol_type = other RNA

SEQ ID NO: 1740 - RNA, 309 nt, Synthetic construct; identical to SEQ ID NO: 1219
  source 1..309: mol_type = other RNA

SEQ ID NO: 1741 - RNA, 254 nt, Synthetic construct; identical to SEQ ID NO: 1224
  source 1..254: mol_type = other RNA

SEQ ID NO: 1742 - RNA, 309 nt, Synthetic construct; identical to SEQ ID NO: 1229
  source 1..309: mol_type = other RNA

SEQ ID NO: 1743 - RNA, 252 nt, Synthetic construct; identical to SEQ ID NO: 1231
  source 1..252: mol_type = other RNA

SEQ ID NO: 1744 - RNA, 328 nt, Synthetic construct; identical to SEQ ID NO: 1236
  source 1..328: mol_type = other RNA

SEQ ID NO: 1745 - RNA, 257 nt, Synthetic construct; identical to SEQ ID NO: 1239
  source 1..257: mol_type = other RNA

SEQ ID NO: 1746 - RNA, 247 nt, Synthetic construct; identical to SEQ ID NO: 1242
  source 1..247: mol_type = other RNA

SEQ ID NO: 1747 - RNA, 301 nt, Synthetic construct; identical to SEQ ID NO: 1251
  source 1..301: mol_type = other RNA

SEQ ID NO: 1748 - RNA, 233 nt, Synthetic construct; identical to SEQ ID NO: 1257
  source 1..233: mol_type = other RNA

SEQ ID NO: 1749 - RNA, 293 nt, Synthetic construct; identical to SEQ ID NO: 1137
  source 1..293: mol_type = other RNA

SEQ ID NO: 1750 - RNA, 293 nt, Synthetic construct; identical to SEQ ID NO: 1137
  source 1..293: mol_type = other RNA

SEQ ID NO: 1751 - RNA, 301 nt, Synthetic construct; identical to SEQ ID NO: 1153
  source 1..301: mol_type = other RNA

SEQ ID NO: 1752 - RNA, 232 nt, Synthetic construct; identical to SEQ ID NO: 1258
  source 1..232: mol_type = other RNA

SEQ ID NO: 1753 - RNA, 189 nt, Synthetic construct; identical to SEQ ID NO: 1260
  source 1..189: mol_type = other RNA

SEQ ID NO: 1754 - RNA, 236 nt, Synthetic construct; identical to SEQ ID NO: 1003
  source 1..236: mol_type = other RNA

SEQ ID NO: 1755 - RNA, 237 nt, Synthetic construct; identical to SEQ ID NO: 1273
  source 1..237: mol_type = other RNA

SEQ ID NO: 1756 - RNA, 322 nt, Synthetic construct; identical to SEQ ID NO: 1280
  source 1..322: mol_type = other RNA

SEQ ID NO: 1757 - RNA, 260 nt, Synthetic construct; identical to SEQ ID NO: 1283
  source 1..260: mol_type = other RNA

SEQ ID NO: 1758 - RNA, 200 nt, Synthetic construct; identical to SEQ ID NO: 1120
  source 1..200: mol_type = other RNA

SEQ ID NO: 1759 - RNA, 200 nt, Synthetic construct; identical to SEQ ID NO: 1120
  source 1..200: mol_type = other RNA

SEQ ID NO: 1760 - RNA, 240 nt, Synthetic construct; identical to SEQ ID NO: 1284
  source 1..240: mol_type = other RNA

SEQ ID NO: 1761 - RNA, 200 nt, Synthetic construct; identical to SEQ ID NO: 1120
  source 1..200: mol_type = other RNA

SEQ ID NO: 1762 - RNA, 207 nt, Synthetic construct; identical to SEQ ID NO: 1121
  source 1..207: mol_type = other RNA

SEQ ID NO: 1763 - RNA, 207 nt, Synthetic construct; identical to SEQ ID NO: 1121
  source 1..207: mol_type = other RNA

SEQ ID NO: 1764 - RNA, 237 nt, Synthetic construct; identical to SEQ ID NO: 1313
  source 1..237: mol_type = other RNA

SEQ ID NO: 1765 - RNA, 232 nt, Synthetic construct; identical to SEQ ID NO: 1122
  source 1..232: mol_type = other RNA

SEQ ID NO: 1766 - RNA, 302 nt, Synthetic construct; identical to SEQ ID NO: 1320
  source 1..302: mol_type = other RNA

SEQ ID NO: 1767 - RNA, 302 nt, Synthetic construct; identical to SEQ ID NO: 1066
  source 1..302: mol_type = other RNA

SEQ ID NO: 1768 - RNA, 302 nt, Synthetic construct; identical to SEQ ID NO: 1066
  source 1..302: mol_type = other RNA

SEQ ID NO: 1769 - RNA, 238 nt, Synthetic construct; identical to SEQ ID NO: 1327
  source 1..238: mol_type = other RNA

SEQ ID NO: 1770 - RNA, 237 nt, Synthetic construct; identical to SEQ ID NO: 1329
  source 1..237: mol_type = other RNA

SEQ ID NO: 1771 - RNA, 237 nt, Synthetic construct; identical to SEQ ID NO: 1330
  source 1..237: mol_type = other RNA

SEQ ID NO: 1772 - RNA, 289 nt, Synthetic construct; identical to SEQ ID NO: 1343
  source 1..289: mol_type = other RNA

SEQ ID NO: 1773 - RNA, 236 nt, Synthetic construct; identical to SEQ ID NO: 1080
  source 1..236: mol_type = other RNA

SEQ ID NO: 1774 - RNA, 233 nt, Synthetic construct; identical to SEQ ID NO: 1312
  source 1..233: mol_type = other RNA

SEQ ID NO: 1775 - RNA, 321 nt, Synthetic construct; identical to SEQ ID NO: 1345
  source 1..321: mol_type = other RNA

SEQ ID NO: 1776 - RNA, 333 nt, Synthetic construct; identical to SEQ ID NO: 1346
  source 1..333: mol_type = other RNA

SEQ ID NO: 1777 - RNA, 236 nt, Synthetic construct; identical to SEQ ID NO: 1348
  source 1..236: mol_type = other RNA

SEQ ID NO: 1778 - RNA, 236 nt, Synthetic construct; identical to SEQ ID NO: 1351
  source 1..236: mol_type = other RNA

SEQ ID NO: 1779 - RNA, 320 nt, Synthetic construct; identical to SEQ ID NO: 1075
  source 1..320: mol_type = other RNA

SEQ ID NO: 1780 - RNA, 320 nt, Synthetic construct; identical to SEQ ID NO: 1075
  source 1..320: mol_type = other RNA

SEQ ID NO: 1781 - RNA, 330 nt, Synthetic construct; identical to SEQ ID NO: 1352
  source 1..330: mol_type = other RNA

SEQ ID NO: 1782 - RNA, 288 nt, Synthetic construct; identical to SEQ ID NO: 1359
  source 1..288: mol_type = other RNA

SEQ ID NO: 1783 - RNA, 236 nt, Synthetic construct; identical to SEQ ID NO: 1097
  source 1..236: mol_type = other RNA

SEQ ID NO: 1784 - RNA, 236 nt, Synthetic construct; identical to SEQ ID NO: 1097
  source 1..236: mol_type = other RNA

SEQ ID NO: 1785 - RNA, 309 nt, Synthetic construct; identical to SEQ ID NO: 1229
  source 1..309: mol_type = other RNA

SEQ ID NO: 1786 - RNA, 309 nt, Synthetic construct; identical to SEQ ID NO: 1219
  source 1..309: mol_type = other RNA

SEQ ID NO: 1787 - RNA, 309 nt, Synthetic construct; identical to SEQ ID NO: 1219
  source 1..309: mol_type = other RNA

SEQ ID NO: 1788 - RNA, 301 nt, Synthetic construct; identical to SEQ ID NO: 1364
  source 1..301: mol_type = other RNA

SEQ ID NO: 1789 - DNA, 79 bp, synthetic construct
  source 1..79: mol_type = other DNA
atgaagaccctgttccagttcatgctgtctatctgctcagcttgccttggtggcgtgccgattggacttgacaacctgt

SEQ ID NO: 1790 - DNA, 70 bp, synthetic construct
  source 1..70: mol_type = other DNA
atggtaatcttacgcttcatgacaatgtgtttatcttggctctgcaaggataaaggtattgacaatctgt

SEQ ID NO: 1791 - DNA, 79 bp, synthetic construct
  source 1..79: mol_type = other DNA
atgaagaccctgttccagttcctgctgtctatctgctcagcttgccttagtggcttgccgattggacttgacaacctgt

SEQ ID NO: 1792 - DNA, 91 bp, synthetic construct
  source 1..91: mol_type = other DNA
atgaatataagtatccgagggctgctggccgcattgctggtcaccctgggctgttacacctgggatgccgccttggggcttgacagcttgt

SEQ ID NO: 1793 - DNA, 79 bp, synthetic construct; identical to SEQ ID NO: 1789
  source 1..79: mol_type = other DNA

SEQ ID NO: 1794 - DNA, 79 bp, synthetic construct
  source 1..79: mol_type = other DNA
ttgcggaatccaggcacagttctgttatcaatctgctttgccaaacttgctttctggctcagtggacttgacaacctgt

SEQ ID NO: 1795 - DNA, 79 bp, synthetic construct
  source 1..79: mol_type = other DNA
atgaagaccctgttccagttcctgctgtctatctgctcagcttgccttggtggcgtgccgattggacttgacaacctgt

SEQ ID NO: 1796 - DNA, 91 bp, synthetic construct
  source 1..91: mol_type = other DNA
atgagaataagtatccgagcgctgctggccgcactgctggtcaccctgggttatttcacctgtggtgccgcgatgggccttgacagcttgt

SEQ ID NO: 1797 - DNA, 52 bp, synthetic construct
  source 1..52: mol_type = other DNA
atgatctcgttgttcatcgacctgatctcgtcgccggcccttgacagggtca

SEQ ID NO: 1798 - DNA, 79 bp, synthetic construct
  source 1..79: mol_type = other DNA
atgaagaccctattccagttcctgctgtctatctgctcagcttgccttattggcataccgctgggagttgacaacctgt

SEQ ID NO: 1799 - DNA, 52 bp, synthetic construct
  source 1..52: mol_type = other DNA
atgagcccagcgacctggatcccgcttgcgcgaacggcgcttgcggtcctta

SEQ ID NO: 1800 - DNA, 91 bp, synthetic construct
  source 1..91: mol_type = other DNA
atgaagataagtatccgagggctgctggccgcattgctggtcaccctgggctgttacacctgggatgccgccttggggcttgacagcttgt

SEQ ID NO: 1801 - DNA, 91 bp, synthetic construct; identical to SEQ ID NO: 1796
  source 1..91: mol_type = other DNA

SEQ ID NO: 1802 - DNA, 79 bp, synthetic construct
  source 1..79: mol_type = other DNA
atgaagaccttgttccagttcctgctgtctatctgctcagtttgctttggttgcattccgattggacttgacagcctgt

SEQ ID NO: 1803 - DNA, 40 bp, synthetic construct
  source 1..40: mol_type = other DNA
atgcacgctacgctgatccgaatcaccgttgacggtataa

SEQ ID NO: 1804 - DNA, 86 bp, synthetic construct
  source 1..86: mol_type = other DNA
atgccaagttactcagaagcattatcgattgtactgagctcggtaaaccttgccgttacaattgagataaggcttgcaagaaatcc

SEQ ID NO: 1805 - DNA, 86 bp, synthetic construct
  source 1..86: mol_type = other DNA
atgccaaattacttagaagcattatcgattgtacttagctcggtaaatcttaccgttacaattgagataaggcttgcaagaagttc

SEQ ID NO: 1806 - DNA, 49 bp, synthetic construct
  source 1..49: mol_type = other DNA
atgaacctcatcgtactaatcgccgctcatttagggcttgacagtttca

SEQ ID NO: 1807 - DNA, 79 bp, synthetic construct
  source 1..79: mol_type = other DNA
atgaagaccctattccagttcctgctgtctatctgctcagcttgccttgtgggcataccgattggacttgacagcctgt

SEQ ID NO: 1808 - DNA, 79 bp, synthetic construct
  source 1..79: mol_type = other DNA
atgaagaccctgttccagttcctgttgtctatctgctcagtttgccttggtggcatgccgattggacttgacaacctgt

SEQ ID NO: 1809 - DNA, 79 bp, synthetic construct
  source 1..79: mol_type = other DNA
atgaagaccctgttccagttcctgttgtatatctgctcagtttgccttggtggcatgccgattggacttgacaacctgt

SEQ ID NO: 1810 - DNA, 79 bp, synthetic construct
  source 1..79: mol_type = other DNA
atgaagaccctgttccagttcctgctgtctatctgctcagcttgccttggtggcttgccgattggacttgacaacctgt

SEQ ID NO: 1811 - DNA, 79 bp, synthetic construct
  source 1..79: mol_type = other DNA
atgaagaccctgttccagtttctgctgtctatctgctcagcttgccttggtggcgtgccgattggacttgacaacctgt

SEQ ID NO: 1812 - DNA, 79 bp, synthetic construct
  source 1..79: mol_type = other DNA
atgaatatcatccaagtgttgcttaccgtcgtcacagtgattggtttcaccaagacctgtgggaggcttgacaacctgt

SEQ ID NO: 1813 - DNA, 94 bp, synthetic construct
  source 1..94: mol_type = other DNA
atggagacaatcgtggtcgaactgacccggatcatcttgatcacagtgttccgctggtcgacgtgcgctagcgcacgctgccctggcgtgataa

SEQ ID NO: 1814 - DNA, 73 bp, synthetic construct
  source 1..73: mol_type = other DNA
atgcccaccgggcaatccgcgatctggtgcaagttactcctcacctcggtgaagatcgcccttgcgtccatta

SEQ ID NO: 1815 - DNA, 79 bp, synthetic construct
  source 1..79: mol_type = other DNA
atgaagaccttgttccagttcctactgtctatctgctcagtttgctttggttgcattccgattggacttgacagcctgt

SEQ ID NO: 1816 - DNA, 109 bp, synthetic construct
  source 1..109: mol_type = other DNA
atgtggtattgccggattgccgcaaagccgcccgcgtggctggcgaaaggagcccgaattatggaactcgcaatctgcaccgccccggaggttggccttgacagtttaa

SEQ ID NO: 1817 - DNA, 112 bp, synthetic construct
  source 1..112: mol_type = other DNA
atgtacgaatgtactttatcatactgtcgccaacataaactaacaagaacggaaatacctatgacgatactgctcattctggttgagcttgctgccagccttgacagtttaa

SEQ ID NO: 1818 - DNA, 107 bp, synthetic construct
  source 1..107: mol_type = other DNA
gtgataagtttaagtagcttaccagaattacaacttgctgtactgtatctggcgttcagctggttacttgtcgaacttcttaagaataaaacgtttgacaaatgtga

SEQ ID NO: 1819 - DNA, 79 bp, synthetic construct
  source 1..79: mol_type = other DNA
atgacggaagtcctgttctacgtgttgtccgcgttgcgtctcagctcatggagcggattcgcgtggcttgacaacctgt

SEQ ID NO: 1820 - DNA, 88 bp, synthetic construct
  source 1..88: mol_type = other DNA
gtgatcgctgccaaactgacgttgatcgccgtgtccgtcctggtcggccgggtggcatccgctagcggatgctgcccagacgtggtaa

SEQ ID NO: 1821 - DNA, 77 bp, synthetic construct
  source 1..77: mol_type = other DNA
atggcaggcctagttatagacgctgcgccggtagtcgcccacctggtcacggatgtgatcagggtgttgacaactcg

SEQ ID NO: 1822 - DNA, 79 bp, synthetic construct
  source 1..79: mol_type = other DNA
atgaagaccctgttccagttcctgctgtctatttgctcagcttgccttggtggcgtgccgattggagttgacaacctgt

SEQ ID NO: 1823 - DNA, 91 bp, synthetic construct
  source 1..91: mol_type = other DNA
atgaagataagtatccgagggctgctggccgcattgctggtcaccctgggttgttacacctgggatgccgccttggggcttgacagcttgt

SEQ ID NO: 1824 - DNA, 79 bp, synthetic construct
  source 1..79: mol_type = other DNA
atgaagaccctgttccagttcctgctgtctatctgctcagcttgccttggtggcgtgccgattggagttgacaacctgt

SEQ ID NO: 1825 - DNA, 79 bp, synthetic construct
  source 1..79: mol_type = other DNA
atgaatatcatccaagtgttgcttaccgtcgtcacagtgattggtttcaccaagaactgtgggaggcttgacaacctgt

SEQ ID NO: 1826 - DNA, 91 bp, synthetic construct
  source 1..91: mol_type = other DNA
atgaaagtcactctattcaacgtcttcacgtgggtgccgtactgtcatgtgctagcggctagccgccagtgcaggtcagttgacatcctgt

SEQ ID NO: 1827 - DNA, 86 bp, synthetic construct
  source 1..86: mol_type = other DNA
atgccaagttattcagaagcgttatcgattgtaattagctgggtcagccatgtgattacaattgagataaagcttgacagaaattc

SEQ ID NO: 1828 - DNA, 86 bp, synthetic construct
  source 1..86: mol_type = other DNA
atgccaagttattcagaagcgttatcgattgtaattagctgggtcagccttgtgattacaattgagataaagcttgacagaaattc

SEQ ID NO: 1829 - DNA, 79 bp, synthetic construct
  source 1..79: mol_type = other DNA
atgaagaccctattccagttcctgtcgtggttcgtctcagttagccttattggcgtccctatagaacttgacaacctgt

SEQ ID NO: 1830 - DNA, 79 bp, synthetic construct; identical to SEQ ID NO: 1829
  source 1..79: mol_type = other DNA

SEQ ID NO: 1831 - DNA, 88 bp, synthetic construct
  source 1..88: mol_type = other DNA
atgcctaacgatatcgacatgcgaattgtaaacttactatttagcatagtaatcgaacaattgtgcgactatctgattgacaatatca

SEQ ID NO: 1832 - DNA, 76 bp, synthetic construct
  source 1..76: mol_type = other DNA
atgagcatcgtccacctgttaatcagcctctgggaggtattcagcgaaggtcgctgtccgagagttgacaaactgt

SEQ ID NO: 1833 - DNA, 79 bp, synthetic construct
  source 1..79: mol_type = other DNA
atgatggaaatcgcggtctacgtgttgtctgcactgcgtctgtgctcggcgagcaattcggcgtggcttgacaacctgt

SEQ ID NO: 1834 - DNA, 73 bp, synthetic construct
  source 1..73: mol_type = other DNA
atgatgataatcgtacacctcatgacaatgttgttgtcttggctcagcaagcgcaacggcattgacaatctgt

SEQ ID NO: 1835 - DNA, 79 bp, synthetic construct
  source 1..79: mol_type = other DNA
atgtgtctactggcttactgtggctgctcaactgaacgactcttgcattgctgcaggaactttctggttgacagcttgt

SEQ ID NO: 1836 - DNA, 73 bp, synthetic construct
  source 1..73: mol_type = other DNA
atgatgataatcgtacacctcatgacaatgttgttgtcttggctcagcaagcgcaacggtattgacaatctgt

SEQ ID NO: 1837 - DNA, 91 bp, synthetic construct
  source 1..91: mol_type = other DNA
atgaatataagtatccgtgggctgctagtctcattgctcgtcaccgtcggttacgtaaccgtcggtgccgtcatgggacttgacagcttgt

SEQ ID NO: 1838 - DNA, 70 bp, synthetic construct
  source 1..70: mol_type = other DNA
atgttaatcttacgcttcatgacgatgtgtttatcttggctctgcaaggataaatacattgacaatctgt

SEQ ID NO: 1839 - DNA, 76 bp, synthetic construct
  source 1..76: mol_type = other DNA
atgagcatcatccacctgtttgtcagcctctggtcggtgtgcagcgaaggtcgctggccgagagttgacgaactgt

SEQ ID NO: 1840 - DNA, 76 bp, synthetic construct
  source 1..76: mol_type = other DNA
atgagcatcgtccacttgttggtcatactctggtcggtttgcagcgaagttagctgtccgagagttgacaaactgt

SEQ ID NO: 1841 - DNA, 76 bp, synthetic construct
  source 1..76: mol_type = other DNA
atgagcatcatccacttgttagccagcctctgtgcggaatgcagtcatggttgctgcccgggagttgacaaactgt

SEQ ID NO: 1842 - DNA, 76 bp, synthetic construct; identical to SEQ ID NO: 1832
  source 1..76: mol_type = other DNA

SEQ ID NO: 1843 - DNA, 73 bp, synthetic construct; identical to SEQ ID NO: 1834
  source 1..73: mol_type = other DNA

SEQ ID NO: 1844 - DNA, 76 bp, synthetic construct
  source 1..76: mol_type = other DNA
atgagcatcgtccacctgttaatcagcctctgggaggtattcagcgaaggtcgctgtccgagagttgacaacctgt

SEQ ID NO: 1845 - DNA, 76 bp, synthetic construct
  source 1..76: mol_type = other DNA
atgagcatcgtccacttgttattcagcttctggtggcaataccgcgagggttgctacgagagagttgacaaactgt

SEQ ID NO: 1846 - DNA, 79 bp, synthetic construct
  source 1..79: mol_type = other DNA
atgacggaaatcgcggtctatgtgttgtctgctctgcatctatgctcttcgagcaattcggcgtggcttgacaacctgt

SEQ ID NO: 1847 - DNA, 76 bp, synthetic construct
  source 1..76: mol_type = other DNA
atgagcatcgtccacctgttgttcagtctctggtcggcgtgttgcgaagctcgctggcccggactggacaaactgt

SEQ ID NO: 1848 - DNA, 76 bp, synthetic construct; identical to SEQ ID NO: 1840
  source 1..76: mol_type = other DNA

SEQ ID NO: 1849 - DNA, 79 bp, synthetic construct; identical to SEQ ID NO: 1833
  source 1..79: mol_type = other DNA

SEQ ID NO: 1850 - DNA, 70 bp, synthetic construct
  source 1..70: mol_type = other DNA
atgaagacgcttatccatgtattgctgtcaatctactcaataagcttagtgagtggacttgacagcttgt

SEQ ID NO: 1851 - DNA, 73 bp, synthetic construct
  source 1..73: mol_type = other DNA
atgaatactctacccgttacgttgatacatttagctttgttcatgaacgaagctgaatgtatttacatactat

SEQ ID NO: 1852 - DNA, 76 bp, synthetic construct; identical to SEQ ID NO: 1832
  source 1..76: mol_type = other DNA

SEQ ID NO: 1853 - DNA, 76 bp, synthetic construct
  source 1..76: mol_type = other DNA
atgagcatcatccacttgttagtcagcctctggtcggtgttcagcgaaggtcgctggccgggagttgacaaactgt

SEQ ID NO: 1854 - DNA, 61 bp, synthetic construct
  source 1..61: mol_type = other DNA
atggaggtccagatggacatcgcaatgatcgcgctggctgccttcgggcttgacagcttca

SEQ ID NO: 1855 - DNA, 85 bp, synthetic construct
  source 1..85: mol_type = other DNA
atgaagctacaaatgtgcaaccctgcgataactatgctgtcaatctgtttattggcttacctaccaaatagacttgacaacttgt

SEQ ID NO: 1856 - DNA, 28 bp, synthetic construct
  source 1..28: mol_type = other DNA
atgtggcgaattgtccttgacgtttcaa

SEQ ID NO: 1857 - DNA, 91 bp, synthetic construct
  source 1..91: mol_type = other DNA
atgacaataatcatcatacatttcctgtggatagccctgtcttggttggcggcaagtttccaagcctaccttgaccttgacagtctgctga

SEQ ID NO: 1858 - DNA, 79 bp, synthetic construct
  source 1..79: mol_type = other DNA
atggtgcagctcgcagtctggttgctatcatccttctcgttctgctcggcgagcggcacgattgtggttgacaacctgt

SEQ ID NO: 1859 - DNA, 94 bp, synthetic construct
  source 1..94: mol_type = other DNA
atggagaccgttgtcgaactgaccattgtcgtaacgatagccctgctccgctgggccgtatgcgcgtattgcgtgcacggacctggcgtggtaa

SEQ ID NO: 1860 - DNA, 97 bp, synthetic construct
  source 1..97: mol_type = other DNA
atggtcacgattgtggtcgaactgatgtcgagccttgtcgctcacctcgtccgggtggcggtcgcagcatgctgcggtcgctctcctagcgtactaa

SEQ ID NO: 1861 - DNA, 85 bp, synthetic construct
  source 1..85: mol_type = other DNA
atggtcgaactgttgtcgagcctcgtcgctcacctcgttcggtcggcgatcgcagcatgctgcgggcgccctcctagcgtgctaa

SEQ ID NO: 1862 - DNA, 49 bp, synthetic construct
  source 1..49: mol_type = other DNA
atggacatcatggcattactgctggtggccttcgggcttgacagcttca

SEQ ID NO: 1863 - DNA, 91 bp, synthetic construct
  source 1..91: mol_type = other DNA
atgaagataagtatccgagcgctgctagccgcactgctggtcaccttgggtggtttcacctgggatgccgccttggggcttgacagcttgt

SEQ ID NO: 1864 - DNA, 82 bp, synthetic construct
  source 1..82: mol_type = other DNA
atgatgctgttcctcgtcacgatggcggtgtcagtctggtttgccagtcaggtgtctgcgcgggctgcagttgacatcatgt

SEQ ID NO: 1865 - DNA, 64 bp, synthetic construct
  source 1..64: mol_type = other DNA
atggagtatcttatgcagatcgccataaatatcttgctggctgcgttcggtcttgacagcttca

SEQ ID NO: 1866 - DNA, 79 bp, synthetic construct
  source 1..79: mol_type = other DNA
atgagtctgatagacctatacagaacaattatctgtgtctgttcaagtgtcaaccattggttaatacttgacagcatgt

SEQ ID NO: 1867 - DNA, 79 bp, synthetic construct
  source 1..79: mol_type = other DNA
atgaatccagtagttacctgcggctgttcaagacagttagtattccagattgtttggaactttctgcttgacagcttgt

SEQ ID NO: 1868 - DNA, 67 bp, synthetic construct
  source 1..67: mol_type = other DNA
atgcggctaaatatccaattgcagctgccaagctgttccggctgggccgggtggcttgacatcctgt

SEQ ID NO: 1869 - DNA, 16 bp, synthetic construct
  source 1..16: mol_type = other DNA
gtgcttgacaaactgt

SEQ ID NO: 1870 - DNA, 16 bp, synthetic construct
  source 1..16: mol_type = other DNA
gtgcttgacaaactgt

SEQ ID NO: 1871 - DNA, 49 bp, synthetic construct
  source 1..49: mol_type = other DNA
atggacatcatggcatacctgctggcggccttcgggcttgacagcttca

SEQ ID NO: 1872 - DNA, 49 bp, synthetic construct; identical to SEQ ID NO: 1871
  source 1..49: mol_type = other DNA

SEQ ID NO: 1873 - DNA, 61 bp, synthetic construct
  source 1..61: mol_type = other DNA
atggaggtccggatggacatcatggcaattctgctggcggctttcgggcttgacagcttca

SEQ ID NO: 1874 - DNA, 52 bp, synthetic construct
  source 1..52: mol_type = other DNA
atggacatcatcattgcattactgctggccgccttcgggcttgacagcttca

SEQ ID NO: 1875 - DNA, 49 bp, synthetic construct; identical to SEQ ID NO: 1871
  source 1..49: mol_type = other DNA

SEQ ID NO: 1876 - DNA, 49 bp, synthetic construct
  source 1..49: mol_type = other DNA
atggacatcatggcatacctgctgttggccttcgggcttgacagcttca

SEQ ID NO: 1877 - DNA, 79 bp, synthetic construct
  source 1..79: mol_type = other DNA
atgcacgttccaatcattctggcgctgtcagtctggaagtccgtcctggagggcggcgattctgggcttgacatcatgt

SEQ ID NO: 1878 - DNA, 91 bp, synthetic construct
  source 1..91: mol_type = other DNA
atgaatataagtatccgtgggctgctcgtctcattactcgtcaccgtcggttacgtaaccgtcggtgccgtcatgggacttgacagcttgt

SEQ ID NO: 1879 - DNA, 86 bp, synthetic construct; identical to SEQ ID NO: 1828
  source 1..86: mol_type = other DNA

SEQ ID NO: 1880 - DNA, 86 bp, synthetic construct
  source 1..86: mol_type = other DNA
atgccaagttacttagaagcattatcgattgtacttagctcggtaaatcttaccgtgacaattgagataaggcttgcaagaagttc

SEQ ID NO: 1881 - DNA, 70 bp, synthetic construct
  source 1..70: mol_type = other DNA
atgaagacactcatctatgcattgctgtcattctgcacaacaagcttgttggacaggtttgacagcttgt

SEQ ID NO: 1882 - DNA, 70 bp, synthetic construct
  source 1..70: mol_type = other DNA
atgaagacactcatctatgcattgctgtcattctgcacaacaagcttgttggacaggtttgacagcctgt

SEQ ID NO: 1883 - DNA, 70 bp, synthetic construct; identical to SEQ ID NO: 1882
  source 1..70: mol_type = other DNA

SEQ ID NO: 1884 - DNA, 76 bp, synthetic construct
  source 1..76: mol_type = other DNA
atgaaattaatcttctttcgcagctggcggatggcaattctgctgatcagtctgatcagcggacttgacatccagc

SEQ ID NO: 1885 - DNA, 79 bp, synthetic construct
  source 1..79: mol_type = other DNA
atgcagatcgtctatatgattgtgctgtcgatcttccggtcaagcgctgcgcttgattccagggagattgacatcatgt

SEQ ID NO: 1886 - DNA, 76 bp, synthetic construct
  source 1..76: mol_type = other DNA
atggaattcttcgtcaacgtgctgttcgcaatgcttggactctctacgagatgcccggcatggcttgacaacctgt

SEQ ID NO: 1887 - DNA, 73 bp, synthetic construct
  source 1..73: mol_type = other DNA
atgaaagtcctacactcgatggcgatacatttggctttgttcatgaaccaagcggaatgtattgtcattctat

SEQ ID NO: 1888 - DNA, 73 bp, synthetic construct
  source 1..73: mol_type = other DNA
atgaaagtcctgcactcgatggctatacatttggctttgttcatgaaccaagcggaatgtattgtcattctat

SEQ ID NO: 1889 - DNA, 105 bp, synthetic construct
  source 1..105: mol_type = other DNA
gtgattagtttattcaatgtcgaagatccgagtttaatagcgttggttctcaacatctggtggtttagcgagtttattaacgttaagaaacttgctaaacttcga

SEQ ID NO: 1890 - DNA, 88 bp, synthetic construct
  source 1..88: mol_type = other DNA
gtgttcgacgtgagtctactagtcagctgcggccatgcaagtcgtctgctagccagtgtactggtgagcgttctacttgacagcttgt

SEQ ID NO: 1891 - DNA, 88 bp, synthetic construct
  source 1..88: mol_type = other DNA
gtgttcgacgtgagtctactagccatctgcggccatgcaagtcgtctgctagccagtgtactggtgcgcgttctacttgacagcttgt

SEQ ID NO: 1892 - DNA, 88 bp, synthetic construct
  source 1..88: mol_type = other DNA
gtgttcgacgtgagtctactagccatctgcggccatgcaagtcgtctgctagccagtgtactggtgagctttctacttgacagcttgt

SEQ ID NO: 1893 - DNA, 88 bp, synthetic construct; identical to SEQ ID NO: 1891
  source 1..88: mol_type = other DNA

SEQ ID NO: 1894 - DNA, 61 bp, synthetic construct
  source 1..61: mol_type = other DNA
atggaggtccgattggacgtcataatgatcgtgctggctgccgtcgggcttgacagcttca

SEQ ID NO: 1895 - DNA, 61 bp, synthetic construct; identical to SEQ ID NO: 1854
  source 1..61: mol_type = other DNA

SEQ ID NO: 1896 - DNA, 109 bp, synthetic construct
  source 1..109: mol_type = other DNA
atgatggccatggccagcatcttgatacagtcgctgatatcgaaactaaccacaggagttatcccattgattaagatgatattgactgtcttcccaattgacagtgtaa

SEQ ID NO: 1897 - DNA, 49 bp, synthetic construct
  source 1..49: mol_type = other DNA
atgttgatgatcgcagcgctattaaccgcctttccgattgacagtataa

SEQ ID NO: 1898 - DNA, 91 bp, synthetic construct
  source 1..91: mol_type = other DNA
atgaagataagtatccgagggctgctggccgcattgctggtcaacctgggttgttatacctgggatgccgccttggggcttgacagcttgt

SEQ ID NO: 1899 - DNA, 91 bp, synthetic construct
  source 1..91: mol_type = other DNA
atgaagataagtatccgagggctgctagccgcattgctggtcaccctgggttgttacacctgggatgccgccttggggcttgacagcttgt

SEQ ID NO: 1900 - DNA, 91 bp, synthetic construct
  source 1..91: mol_type = other DNA
atgaatataagtatccgagggctgctggccgcattgctggtcaccctgggtggttacacttgggataccgccttggggcttgacagcttgt

SEQ ID NO: 1901 - DNA, 91 bp, synthetic construct
  source 1..91: mol_type = other DNA
atgaagataagtatccgagggctgctggccgcattgctggtcaccctaggttgttacacctgggatgccgccttggggcttgacagcttgt

SEQ ID NO: 1902 - DNA, 91 bp, synthetic construct; identical to SEQ ID NO: 1823
  source 1..91: mol_type = other DNA

SEQ ID NO: 1903 - DNA, 91 bp, synthetic construct
  source 1..91: mol_type = other DNA
atgaagataagtatccgagggctgctggccgcattgctggtcaacctgggttgttacacctgggatgccgccttggggcttgacagcttgt

SEQ ID NO: 1904 - DNA, 91 bp, synthetic construct
  source 1..91: mol_type = other DNA
atgaagataagtatccgagggctgctggccgcattgctggtcaccctgggttgttatacctgggatgccgctctggggcttgacagcttgt

SEQ ID NO: 1905 - DNA, 91 bp, synthetic construct
  source 1..91: mol_type = other DNA
atgaagataagtatccgagagctgctggccgcattgctggtcaccctgggttgttacacctgggatgccgccttggggcttgacagcttgt

SEQ ID NO: 1906 - DNA, 91 bp, synthetic construct; identical to SEQ ID NO: 1823
  source 1..91: mol_type = other DNA

SEQ ID NO: 1907 - DNA, 91 bp, synthetic construct
  source 1..91: mol_type = other DNA
atgaatcacgttacccgtctgctgctggccgtcgccatggttgccttaggtatcgctacctctggttgcctggcggggcttgacagcctgt

SEQ ID NO: 1908 - DNA, 109 bp, synthetic construct
  source 1..109: mol_type = other DNA
atgtggtattgccgaattgccgcaaagccgcccgcgtggctggcgagaggagcccgaatgatcgaactcgcgtcttgcaccggctgcgaaactggccttgacagtttaa

SEQ ID NO: 1909 - DNA, 109 bp, synthetic construct
  source 1..109: mol_type = other DNA
atgatggccatggccatcatcttgatacagtcgctgatatcgaacctaaccacaggagctatcccattgattaagatgatattgactgtcttcccgattgaccgtgtaa

SEQ ID NO: 1910 - DNA, 67 bp, synthetic construct
  source 1..67: mol_type = other DNA
atgaagttgacaatccaagtgagtccatcaagttgctccggctatgccggatggcttgactttctgt

SEQ ID NO: 1911 - DNA, 109 bp, synthetic construct
  source 1..109: mol_type = other DNA
atgtggtattgccggattgccgcaacgccgcccgcgtggctggcgaaaggagcccgaattatggaactcgcgatctgcaccgccccggaagctggccttgacagtttaa

SEQ ID NO: 1912 - DNA, 49 bp, synthetic construct
  source 1..49: mol_type = other DNA
ttggaactcgcattatgcgtaacagaagcactaggacttgacagtttaa

SEQ ID NO: 1913 - DNA, 79 bp, synthetic construct
  source 1..79: mol_type = other DNA
atgaaactcattgtccagattgtgctgtcgattgtgctttcaggccatgttgcgggcttcagcgggcttgacatcatgt

SEQ ID NO: 1914 - DNA, 88 bp, synthetic construct
  source 1..88: mol_type = other DNA
gtgttcgacgtgagtctactagccatctgcggccatgcaagtcgtctgctagccagtgtactggtgagcgttctacttgacagcttgt

SEQ ID NO: 1915 - DNA, 73 bp, synthetic construct
  source 1..73: mol_type = other DNA
ttgcggaatcctgtcatcgcgctgctatcaatcgtcctggcgatcacgctgccgggcggaattgacaacttgt

SEQ ID NO: 1916 - DNA, 82 bp, synthetic construct
  source 1..82: mol_type = other DNA
atgaagctagaccccagttgcgcgatgtcgttgcattctctggctcgttttcacgtatgcttgcaaatgcttgacatcctgt

SEQ ID NO: 1917 - DNA, 91 bp, synthetic construct
  source 1..91: mol_type = other DNA
atgttcataggaacactaatcatcctgaccattggccagatgtcattatctcagcaatgtctatacattaactttcgacttgacatcctgt

SEQ ID NO: 1918 - DNA, 79 bp, synthetic construct
  source 1..79: mol_type = other DNA
atgaagaccttattccagttcctgctgtctatctgctcagtttgctttggttgcattccgattggacttgacagcctgt

SEQ ID NO: 1919 - DNA, 34 bp, synthetic construct
  source 1..34: mol_type = other DNA
gtgtcgctggcgaagttcgccgttgacgtcatca

SEQ ID NO: 1920 - DNA, 79 bp, synthetic construct; identical to SEQ ID NO: 1819
  source 1..79: mol_type = other DNA

SEQ ID NO: 1921 - DNA, 79 bp, synthetic construct; identical to SEQ ID NO: 1819
  source 1..79: mol_type = other DNA

SEQ ID NO: 1922 - DNA, 70 bp, synthetic construct
  source 1..70: mol_type = other DNA
atggaaacaataatgttcatgatagcgtcagttactttaagatttctcttgcagtaccttgacaaactgt

SEQ ID NO: 1923 - DNA, 79 bp, synthetic construct
  source 1..79: mol_type = other DNA
atgacggagatcatagtctatgcgttatcagcgctgcgtctctgctcttggagccgttcggcgtggcttgacaacctgt

SEQ ID NO: 1924 - DNA, 88 bp, synthetic construct
  source 1..88: mol_type = other DNA
atgtttcagctaatcgttatgtgcggctgctcaaggcatgtggtcaccagttatggttgctggctccaattgctacttgacagcttgt

SEQ ID NO: 1925 - DNA, 79 bp, synthetic construct
  source 1..79: mol_type = other DNA
atgacggaaatcctagtctatgcgttgtctgcgctgcgtctctgctcgtggagcggttcggcatggcttgacaacctgt

SEQ ID NO: 1926 - DNA, 91 bp, synthetic construct
  source 1..91: mol_type = other DNA
atgaagataagtctccgtgggctgctggccgcattgctggtaatcgtaggatgttattcctccggaaccgccttggggcttgacagcttgt

SEQ ID NO: 1927 - DNA, 91 bp, synthetic construct; identical to SEQ ID NO: 1926
  source 1..91: mol_type = other DNA

SEQ ID NO: 1928 - DNA, 79 bp, synthetic construct; identical to SEQ ID NO: 1795
  source 1..79: mol_type = other DNA

SEQ ID NO: 1929 - DNA, 91 bp, synthetic construct; identical to SEQ ID NO: 1857
  source 1..91: mol_type = other DNA

SEQ ID NO: 1930 - DNA, 82 bp, synthetic construct
  source 1..82: mol_type = other DNA
atgcgctgcgcactggcggaaggagccccgattatggaacaagcaatctgcactggcctaacaacgagccttgacagtttaa

SEQ ID NO: 1931 - DNA, 73 bp, synthetic construct
  source 1..73: mol_type = other DNA
atgcccattgggcactctgcgatctggtgcaagctgatcgtcgcattcgcgaacatcgttcttgcgtccatta

SEQ ID NO: 1932 - DNA, 70 bp, synthetic construct
  source 1..70: mol_type = other DNA
atgataaccttacgcttcctatccatgaccttctcttggctagccaagagtaaatacattgacaatctgt

SEQ ID NO: 1933 - DNA, 43 bp, synthetic construct
  source 1..43: mol_type = other DNA
atggacatcattataaatattctcggaaaccttgacagtttca

SEQ ID NO: 1934 - DNA, 43 bp, synthetic construct
  source 1..43: mol_type = other DNA
atggatctcatcataaatattctcggaaaccttgacagtttca

SEQ ID NO: 1935 - DNA, 43 bp, synthetic construct
  source 1..43: mol_type = other DNA
atggaactcgcattgaataccttcataagccttgacagcttca

SEQ ID NO: 1936 - DNA, 103 bp, synthetic construct
  source 1..103: mol_type = other DNA
atgttgctccgatatgctggcaagacgccgtggtggcttaccgtaggagcccagattatgaaactcgcaatcagtagtcacacattttgccttgacagtgaaa

SEQ ID NO: 1937 - DNA, 110 bp, synthetic construct
  source 1..110: mol_type = other DNA
atgtgtctggcggcggccaccatctggtgggatcccagtcagtcactccaacttcaagctctcctgtgcagtctcctgacagaaattatgaagaaagggttgacaacaat

SEQ ID NO: 1938 - DNA, 103 bp, synthetic construct
  source 1..103: mol_type = other DNA
atgcgtattaccataaatattcatattaagcatattcatatctacagcattgtcatcggaataatcatccatcactgggaggttattctggttgacatcatgt

SEQ ID NO: 1939 - DNA, 103 bp, synthetic construct
  source 1..103: mol_type = other DNA
atgcgtattaccataaatattcatattaagcatattcatatctacagcattgtcatcggaataatcaccaataactggaggattattctggttgacatcatgt

SEQ ID NO: 1940 - DNA, 86 bp, synthetic construct
  source 1..86: mol_type = other DNA
atgaacatattgttaatattgccgctatattctgcttatagcttagttgacaactataatagaaactctgaatccaaaacgatcca

SEQ ID NO: 1941 - DNA, 94 bp, synthetic construct
  source 1..94: mol_type = other DNA
atgacaataatctatgccatgcgtttcctgttgataatactgtcatggtctatggcaactttcgaagcctataatgaccttgacagtctgctga

SEQ ID NO: 1942 - DNA, 79 bp, synthetic construct
  source 1..79: mol_type = other DNA
atgaaatgtaacctcgccacgcggatgtcgtatgccgtgttggcagcgattagctgtcaatttggtgttgacatcttgt

SEQ ID NO: 1943 - DNA, 79 bp, synthetic construct
  source 1..79: mol_type = other DNA
atgaaatgtaacctcgccacgcggatgtcgtatgccgtgttggcagcaattagctgtcagtttggtgttgacatcttgt

SEQ ID NO: 1944 - DNA, 58 bp, synthetic construct
  source 1..58: mol_type = other DNA
atggagatgaccttgtcgatcatcaacctgatcttcgcggcgagacttgacaggctta

SEQ ID NO: 1945 - DNA, 88 bp, synthetic construct
  source 1..88: mol_type = other DNA
atgaaattgcaagtcaccaactggatcgtgtcaatcttcattgaacttatcgcattctgcgtaggtccaatttgtattgacagcttgt

SEQ ID NO: 1946 - DNA, 79 bp, synthetic construct
  source 1..79: mol_type = other DNA
atgagtctattaaccgcctgtcatagcttcaagaagcgcctgttccagttcatggttcaggtagcccttgacagcttgt

SEQ ID NO: 1947 - DNA, 40 bp, synthetic construct
  source 1..40: mol_type = other DNA
atgtaccaaaccagcgcgaatttagcggttgacagtataa

SEQ ID NO: 1948 - DNA, 76 bp, synthetic construct
  source 1..76: mol_type = other DNA
atgagcatcttccaagtgttgtataccgtctggtcagcgagctttgcaggacgctgttcatggcttgacaacctgt

SEQ ID NO: 1949 - DNA, 76 bp, synthetic construct
  source 1..76: mol_type = other DNA
atgagcatcttccaagtgttgtataccatctggtcagcgagctttgcaggacgctgtccatggcttgacaacctgt

SEQ ID NO: 1950 - DNA, 76 bp, synthetic construct
  source 1..76: mol_type = other DNA
atgagcatcttccaagtgttgtataccgtctggtcagcgagctttgcaggacgctgtccatggcttgacaacctgt

SEQ ID NO: 1951 - DNA, 86 bp, synthetic construct
  source 1..86: mol_type = other DNA
atgccaagttattcagaagcgttatcgattgtaattgactggataagtattatgattacaattgagataaagcttgacagaaattc

SEQ ID NO: 1952 - DNA, 76 bp, synthetic construct
  source 1..76: mol_type = other DNA
atgagcatcgtccacttgttggtcagcctctggtcggtgttcagcgaaggtcgctggccgggagttgacaaactgt

SEQ ID NO: 1953 - DNA, 88 bp, synthetic construct
  source 1..88: mol_type = other DNA
gtgttcgacgtgagtctactaaccatctgcggccatgcaagtcgtctgctagccagtgtactggtgcgcgttctacttgacagcttgt

SEQ ID NO: 1954 - DNA, 73 bp, synthetic construct
  source 1..73: mol_type = other DNA
gtgctcactggatgccactggatcagatttatactgatagccattatgagcatctacgcacttgacaaaagat

SEQ ID NO: 1955 - DNA, 73 bp, synthetic construct; identical to SEQ ID NO: 1954
  source 1..73: mol_type = other DNA

SEQ ID NO: 1956 - DNA, 76 bp, synthetic construct
  source 1..76: mol_type = other DNA
atgaatatcatccacctgctagtcagcctctggtcggtgttcagcgaaggtcgctggccgggagttgacaaactgt

SEQ ID NO: 1957 - DNA, 91 bp, synthetic construct
  source 1..91: mol_type = other DNA
atgaagataagtatccgagggctgctggccgcattgctagtcaccctgggttgttacacctgggatgccgccttggggcttgacagcttgt

SEQ ID NO: 1958 - DNA, 91 bp, synthetic construct; identical to SEQ ID NO: 1823
  source 1..91: mol_type = other DNA

SEQ ID NO: 1959 - DNA, 88 bp, synthetic construct
  source 1..88: mol_type = other DNA
atgaaacttaggataaccttcgtcgagatgttgttatcgttcctatcgttaagcttattcggcgtccagatagtacttgacaacatgt

SEQ ID NO: 1960 - DNA, 88 bp, synthetic construct
  source 1..88: mol_type = other DNA
atgaaacttaggataagcttcgtcgagatgttgttatggtttctatcgttaagcttattaggcgttccgatagtacttgacaacatgt

SEQ ID NO: 1961 - DNA, 91 bp, synthetic construct
  source 1..91: mol_type = other DNA
atgagaataagtatccgagcgctgctgtccgcactgctggtcaccctgggttatttcacctgtggtgccgcgataggacttgacagcttgt

SEQ ID NO: 1962 - DNA, 86 bp, synthetic construct
  source 1..86: mol_type = other DNA
atgccaagttattcagaagcgttatcgattgtaatcgactgggtaagtattatgattacaattgagataaagcttgacagaaattc

SEQ ID NO: 1963 - DNA, 88 bp, synthetic construct
  source 1..88: mol_type = other DNA
atgcctaacgatatcgacatgagaattgtaatcttactatttagcatagtaatcgaacaatcgtgcgactatctgcttgacaacatca

SEQ ID NO: 1964 - DNA, 91 bp, synthetic construct; identical to SEQ ID NO: 1898
  source 1..91: mol_type = other DNA

SEQ ID NO: 1965 - DNA, 91 bp, synthetic construct
  source 1..91: mol_type = other DNA
atgaagataagtatccgagggctgctggccgcattgctggtcacctttggttgttatacctgggatgccgccatggggcttgacagcttgt

SEQ ID NO: 1966 - DNA, 86 bp, synthetic construct
  source 1..86: mol_type = other DNA
atgccaagttattcagaagcgttatcaattgtaattgactggataagtattatgattacaattgagataaagcttgacagaaattc

SEQ ID NO: 1967 - DNA, 86 bp, synthetic construct
  source 1..86: mol_type = other DNA
atgccaagttattcagaagcattatcgattgtaattagctgggtcagccttgtgattacaattgagataaagcttgacagaaattc

SEQ ID NO: 1968 - DNA, 110 bp, synthetic construct
  source 1..110: mol_type = other DNA
atgttgctaagtttgtctagcaatctagaagtccagctagtgctgttcttgatagaagttactagtttgcttgttgaggttctaaatatttataaccttgacaagcgtga

SEQ ID NO: 1969 - DNA, 91 bp, synthetic construct; identical to SEQ ID NO: 1903
  source 1..91: mol_type = other DNA

SEQ ID NO: 1970 - DNA, 86 bp, synthetic construct
  source 1..86: mol_type = other DNA
atgcccagttattcagaagcaatatcatttgtaattagcttgattagcagtggaattacaattgagataaagcttgacagaaattc

SEQ ID NO: 1971 - DNA, 82 bp, synthetic construct
  source 1..82: mol_type = other DNA
gtgaagaccctattccatcatgtccagtcgtcttgttggtcggcctgccttattggcttgctgattgtgcttgacaacttgt

SEQ ID NO: 1972 - DNA, 88 bp, synthetic construct
  source 1..88: mol_type = other DNA
atgctattacacataatactaccttgtttgccggtattcgcattgtttctcggcgtttcgccgggatgcgtaacacttgacattcagt

SEQ ID NO: 1973 - DNA, 79 bp, synthetic construct
  source 1..79: mol_type = other DNA
gtgacgactctattcaatgtattgctgtcattcttctcagttagcttgcttggctttccgattagacttgacaacctgt

SEQ ID NO: 1974 - DNA, 95 bp, synthetic construct
  source 1..95: mol_type = other DNA
atgttcattacaatcttaattctggtcacggtgaccagtatcagacagcctcaaaccatttcttataaatgtttgttagaactgttgacaacaat

SEQ ID NO: 1975 - DNA, 46 bp, synthetic construct
  source 1..46: mol_type = other DNA
atgatactcgttcgactgctggtcgccttggggcttgacaacttca

SEQ ID NO: 1976 - DNA, 70 bp, synthetic construct
  source 1..70: mol_type = other DNA
atgaagacacttatccatgtattgctgtcattctgctcaataagcttattgagtaggtttgacagcctgt

SEQ ID NO: 1977 - DNA, 110 bp, synthetic construct
  source 1..110: mol_type = other DNA
atgttgctaagtttgtctagcaatctagaaatccagctagtgctgttcttgatagaagttactagtttgcttgttgaggttctaaatatttataaccttgacaagcgtga

SEQ ID NO: 1978 - DNA, 86 bp, synthetic construct
  source 1..86: mol_type = other DNA
atgccaagttattcagcagcgttatcgataataattagcttggttaaccaagtgattacaattgagataaagcttgacagaaattc

SEQ ID NO: 1979 - DNA, 85 bp, synthetic construct
  source 1..85: mol_type = other DNA
atgccggaccgatatctggcacgaggagcccgaattgtgaaactcgcgcattgcctggacatcgcgacatgccttgacagtagaa

SEQ ID NO: 1980 - DNA, 91 bp, synthetic construct; identical to SEQ ID NO: 1823
  source 1..91: mol_type = other DNA

SEQ ID NO: 1981 - DNA, 52 bp, synthetic construct
  source 1..52: mol_type = other DNA
atggtggaactcgcaatctgctcagacctcgaatttggccttgacagtataa

SEQ ID NO: 1982 - DNA, 49 bp, synthetic construct
  source 1..49: mol_type = other DNA
ttgctgtcattctgctcaattagcttattgagtaggtttgacagcctgt

SEQ ID NO: 1983 - DNA, 49 bp, synthetic construct; identical to SEQ ID NO: 1982
  source 1..49: mol_type = other DNA

SEQ ID NO: 1984 - DNA, 91 bp, synthetic construct
  source 1..91: mol_type = other DNA
atgaagataagtatccgagcgctgctggccgcactgatggtcaccctgggtggtttcacctgggatgccgccttggggcttgacagcttgt

SEQ ID NO: 1985 - DNA, 49 bp, synthetic construct; identical to SEQ ID NO: 1982
  source 1..49: mol_type = other DNA

SEQ ID NO: 1986 - DNA, 79 bp, synthetic construct; identical to SEQ ID NO: 1829
  source 1..79: mol_type = other DNA

SEQ ID NO: 1987 - DNA, 49 bp, synthetic construct
  source 1..49: mol_type = other DNA
atggtactcgaaatctgcatgtacctggccacaggacttgacagtttaa

SEQ ID NO: 1988 - DNA, 72 bp, synthetic construct
  source 1..72: mol_type = other DNA
atggacaatataattcttaatatcatcaactgtatgctattaattctgttcaagaatattcttgacatagat

SEQ ID NO: 1989 - DNA, 86 bp, synthetic construct; identical to SEQ ID NO: 1962
  source 1..86: mol_type = other DNA

SEQ ID NO: 1990 - DNA, 86 bp, synthetic construct
  source 1..86: mol_type = other DNA
atgccaagttattcagaagcgttatcgattgtaatcgactgggtaagtattatgattataattgagataaagcttgacagaaattc

SEQ ID NO: 1991 - DNA, 70 bp, synthetic construct; identical to SEQ ID NO: 1976
  source 1..70: mol_type = other DNA

SEQ ID NO: 1992 - DNA, 49 bp, synthetic construct; identical to SEQ ID NO: 1982
  source 1..49: mol_type = other DNA

SEQ ID NO: 1993 - DNA, 91 bp, synthetic construct
  source 1..91: mol_type = other DNA
atgaagataagtatccgagcgctgctggccgcactgctggtcaccttgggtggtttcacctgggatgccgccttggggcttgacagcttgt

SEQ ID NO: 1994 - DNA, 82 bp, synthetic construct
  source 1..82: mol_type = other DNA
atgaagaccctgttccagatattgttatcaatcttatctttggtttcccttgggattccgcaaataggacttgacaacctgt

SEQ ID NO: 1995 - DNA, 40 bp, synthetic construct
  source 1..40: mol_type = other DNA
atgcactacaccacggcgaatttagatgttgacggtataa

SEQ ID NO: 1996 - DNA, 88 bp, synthetic construct
  source 1..88: mol_type = other DNA
atgaacattgagaacatattagtccagttgttgttatcgttcttatcattagccttgtttggcttaccgatagtacttgacaaactgt

SEQ ID NO: 1997 - DNA, 86 bp, synthetic construct
  source 1..86: mol_type = other DNA
atgccaagttattcagaagcgttatcgattgtaattagctggggcagccttgtgattacaattgagataaagcttgacagaaattc

SEQ ID NO: 1998 - DNA, 43 bp, synthetic construct
  source 1..43: mol_type = other DNA
atggcgatcaatatcattgcaaacttcagccttgacagtttca

SEQ ID NO: 1999 - DNA, 91 bp, synthetic construct
  source 1..91: mol_type = other DNA
atgaagataagtatccgagggctggtagccgcattgctggtcatcttaagtggttataccggggatgcagctttatggcttgacagcttgt

SEQ ID NO: 2000 - DNA, 109 bp, synthetic construct
  source 1..109: mol_type = other DNA
atgtggtattgcctgattgccgcaaagccgcccgcgtggctggcgagaggagcccgaatgatcgaactcgcgtcttgcaccggctgcgaaactggccttgacagtttaa

SEQ ID NO: 2001 - DNA, 91 bp, synthetic construct
  source 1..91: mol_type = other DNA
atgagtataagtatccgagggctgctggccgcattgctggtcaccctgggctgttacacctgggatgccgccttggggcttgacagcttgt

SEQ ID NO: 2002 - DNA, 88 bp, synthetic construct; identical to SEQ ID NO: 1960
  source 1..88: mol_type = other DNA

SEQ ID NO: 2003 - DNA, 91 bp, synthetic construct; identical to SEQ ID NO: 1903
  source 1..91: mol_type = other DNA

SEQ ID NO: 2004 - DNA, 91 bp, synthetic construct
  source 1..91: mol_type = other DNA
atgaagataagtatccgagggctgctggccgcattgctggtcaccctgggtagttacacctgggatgccgccttggggcttgacagcttgt

SEQ ID NO: 2005 - DNA, 91 bp, synthetic construct
  source 1..91: mol_type = other DNA
atgaagataagtatccgagggctgctggccgcactgctggtcaccttgggttgttacacctgggatgccgccttggggcttgacagcttgt

SEQ ID NO: 2006 - DNA, 79 bp, synthetic construct
  source 1..79: mol_type = other DNA
atgaagaccctgttccagttcttgctgcctacctgctcagcttgccttggtggcttgccgattggacttgacaacctgt

SEQ ID NO: 2007 - DNA, 79 bp, synthetic construct
  source 1..79: mol_type = other DNA
atgaggacgaccatcgcaacgtgggtgtcaatcgtgtcgggctgccgtattggcggcctggcatggcttgacatcctgt

SEQ ID NO: 2008 - DNA, 91 bp, synthetic construct
  source 1..91: mol_type = other DNA
atgaagataactatccgagggctgctggccgcattgctggtcatcttgggttgttacacttgggatgccgccttggggcttgacagcttgt

SEQ ID NO: 2009 - DNA, 86 bp, synthetic construct; identical to SEQ ID NO: 1951
  source 1..86: mol_type = other DNA

SEQ ID NO: 2010 - DNA, 79 bp, synthetic construct
  source 1..79: mol_type = other DNA
gtgaggaccctgttccatgtattgttatcgttctgctcagcttaccttactggtttgccggtcatacttgacaacctgt

SEQ ID NO: 2011 - DNA, 79 bp, synthetic construct; identical to SEQ ID NO: 1807
  source 1..79: mol_type = other DNA

SEQ ID NO: 2012 - DNA, 79 bp, synthetic construct
  source 1..79: mol_type = other DNA
atgaatatcatccaagtgttgcttaccgtcgtcacagtgattgggttcaccaagaactgtgggaggcttgacaacctgt

SEQ ID NO: 2013 - DNA, 88 bp, synthetic construct; identical to SEQ ID NO: 1914
  source 1..88: mol_type = other DNA

SEQ ID NO: 2014 - DNA, 76 bp, synthetic construct; identical to SEQ ID NO: 1832
  source 1..76: mol_type = other DNA

SEQ ID NO: 2015 - DNA, 73 bp, synthetic construct
  source 1..73: mol_type = other DNA
atgattcgattagtctcgtcaatccacgcattggcgaccattgtgggagccatggctggtattgacaacctgt

SEQ ID NO: 2016 - DNA, 76 bp, synthetic construct; identical to SEQ ID NO: 1952
  source 1..76: mol_type = other DNA

SEQ ID NO: 2017 - DNA, 79 bp, synthetic construct
  source 1..79: mol_type = other DNA
atgaagctaatcgtccagactgtgctatcaatctcgctgtcgtgccatgttgcgggcttcggcgggcttgacatcatgt

SEQ ID NO: 2018 - DNA, 28 bp, synthetic construct
  source 1..28: mol_type = other DNA
atggttcaggtagcccttgacagcttgt

SEQ ID NO: 2019 - DNA, 40 bp, synthetic construct
  source 1..40: mol_type = other DNA
atgcacccgaccgacctgaaattagctgttgacggtataa

SEQ ID NO: 2020 - DNA, 86 bp, synthetic construct; identical to SEQ ID NO: 1951
  source 1..86: mol_type = other DNA

SEQ ID NO: 2021 - DNA, 94 bp, synthetic construct
  source 1..94: mol_type = other DNA
ttgctaaccctggtcagagctttcgctccgaggtggtcgcttcgagttgcgggccgagttgttctcggtggccggctcgaagttgacaactcga

SEQ ID NO: 2022 - DNA, 76 bp, synthetic construct; identical to SEQ ID NO: 1844
  source 1..76: mol_type = other DNA

SEQ ID NO: 2023 - DNA, 76 bp, synthetic construct; identical to SEQ ID NO: 1952
  source 1..76: mol_type = other DNA

SEQ ID NO: 2024 - DNA, 79 bp, synthetic construct
  source 1..79: mol_type = other DNA
atgatggaaatcgcggtctacgcgttgtctgcactgcgtctgtgctcggcgagcaattcggcgtggcttgacaacctgt

SEQ ID NO: 2025 - DNA, 70 bp, synthetic construct
  source 1..70: mol_type = other DNA
atgataatcttacacctcgttgcaatgtgcttatcttggctctgccagagtaaatacattgacaaactgt

SEQ ID NO: 2026 - DNA, 73 bp, synthetic construct
  source 1..73: mol_type = other DNA
atgatgataatcgtacacctcatgacaatgttgttgtcttgcctcagcaagcgcaacggcattgacaatctgt

SEQ ID NO: 2027 - DNA, 17 bp, synthetic construct
  source 1..17: mol_type = other DNA
atgagcttgacaacaat

SEQ ID NO: 2028 - DNA, 76 bp, synthetic construct; identical to SEQ ID NO: 1952
  source 1..76: mol_type = other DNA

SEQ ID NO: 2029 - DNA, 76 bp, synthetic construct
  source 1..76: mol_type = other DNA
atggcgcagctcgcagtctggttgctgtcatcgatttcggtctgcttgcgcggcacgattcgtgttgacaacctgt

SEQ ID NO: 2030 - DNA, 108 bp, synthetic construct
  source 1..108: mol_type = other DNA
atgattacaaactacttgataatgatattgttagtgttgaaaccttggattgccttatgggctaggttccttattacaatacttcttaacaaactgtttgacagttca

SEQ ID NO: 2031 - DNA, 91 bp, synthetic construct
  source 1..91: mol_type = other DNA
atgaagataagtctccgtgggctgctggccgcattgctggtaatcgtaggatgttattcttccggaaccgccttggggcttgacagcttgt

SEQ ID NO: 2032 - DNA, 76 bp, synthetic construct; identical to SEQ ID NO: 1840
  source 1..76: mol_type = other DNA

SEQ ID NO: 2033 - DNA, 70 bp, synthetic construct; identical to SEQ ID NO: 1881
  source 1..70: mol_type = other DNA

SEQ ID NO: 2034 - DNA, 12 bp, synthetic construct
  source 1..12: mol_type = other DNA
tataattgaaag

SEQ ID NO: 2035 - DNA, 88 bp, synthetic construct
  source 1..88: mol_type = other DNA
atgccgtttggactgtcagagagcacactgagcgaaccaataaacttggtatacttattgctaggtacttatatattcactaacttaa

SEQ ID NO: 2036 - DNA, 73 bp, synthetic construct
  source 1..73: mol_type = other DNA
ttgcggaatcctgtcatcgctctgctatcaatcgtcctggcgatcacgctgccgggcggaattgacaacttgt

SEQ ID NO: 2037 - DNA, 103 bp, synthetic construct
  source 1..103: mol_type = other DNA
atgttcgcgtgggcgacttcgtgcaaccgcaacaagatgtcggaggtcaacatgaacctcgcgtttctcctggtggggatcgcattcggccttgacagcttca

SEQ ID NO: 2038 - DNA, 70 bp, synthetic construct
  source 1..70: mol_type = other DNA
atggtaatcttacgcttcatgacaatgtgtttatcttggctctgcaaggataaatgcattgacaatctgt

SEQ ID NO: 2039 - DNA, 88 bp, synthetic construct; identical to SEQ ID NO: 1914
  source 1..88: mol_type = other DNA

SEQ ID NO: 2040 - DNA, 108 bp, synthetic construct
  source 1..108: mol_type = other DNA
atgattacaaaccacttgataatgatattgttagtgttgaaaccttggattgccttatgggctaggttccttattacaatacttcttaacaaactgtttgacagttca

SEQ ID NO: 2041 - DNA, 70 bp, synthetic construct
  source 1..70: mol_type = other DNA
atggcaatcttacgcttcatgacaatgtgtttatcttggctctgcaaggataaaggcattgacaatctgt

SEQ ID NO: 2042 - DNA, 49 bp, synthetic construct
  source 1..49: mol_type = other DNA
atggcactactcgaagcgctgctcgcgattcttgggcttgacagtctta

SEQ ID NO: 2043 - DNA, 73 bp, synthetic construct
  source 1..73: mol_type = other DNA
atgatgataatcttacacctcatggcaatgtgtttatcttggcaaagcaagaatcgagacattgaccatctgt

SEQ ID NO: 2044 - DNA, 73 bp, synthetic construct
  source 1..73: mol_type = other DNA
atgatgataatcttacacctcatggcaatgtgtttatcttggcaaagcaagaatcgagacattgacaatctgt

SEQ ID NO: 2045 - DNA, 73 bp, synthetic construct
  source 1..73: mol_type = other DNA
atgatgataatcttacacctcttggcaatgcgtttatcttggctaagcaagaatcgacatattgacaacctgt

SEQ ID NO: 2046 - DNA, 70 bp, synthetic construct; identical to SEQ ID NO: 1882
  source 1..70: mol_type = other DNA

SEQ ID NO: 2047 - DNA, 108 bp, synthetic construct
  source 1..108: mol_type = other DNA
atgatcacaaaccacttgataatgatattgttagtgctgaaaccatggagtgccttactcgctaggttccttactacaatactgcttaacaaactgcttgacagttca

SEQ ID NO: 2048 - DNA, 79 bp, synthetic construct
  source 1..79: mol_type = other DNA
atgacggaaatcgcggtctacgtgttgtctgcactgcgtctgtgctctacgagcaattcggcgtggcttgacaacctgt

SEQ ID NO: 2049 - DNA, 79 bp, synthetic construct
  source 1..79: mol_type = other DNA
atgcggattaccgtcgcaatgctcgcgtcaatcatgacaggctgccgtgaaggctgcctggaatggcttgacattctgt

SEQ ID NO: 2050 - DNA, 49 bp, synthetic construct
  source 1..49: mol_type = other DNA
atggaggattctatcgcacagattatgcaaatatgccttgacagtatta

SEQ ID NO: 2051 - DNA, 79 bp, synthetic construct; identical to SEQ ID NO: 2048
  source 1..79: mol_type = other DNA

SEQ ID NO: 2052 - DNA, 79 bp, synthetic construct
  source 1..79: mol_type = other DNA
atgacggaaatcctgttctacgtgttgtccgcgttgcgtctcagctcatggagcggattcgcgtggcttgacaacctgt

SEQ ID NO: 2053 - DNA, 103 bp, synthetic construct
  source 1..103: mol_type = other DNA
atgttcgcgtgggcgacttcgtgcaaccgcaacaagatgtcggaggtcaacatgaacctcgcgtttctcctggtggggatcgcattcggtcttgacagcttca

SEQ ID NO: 2054 - DNA, 88 bp, synthetic construct
  source 1..88: mol_type = other DNA
atgaattgcaaccttgccgactggatgacgttagttgccatggaacttatcgcattgtgcgacggtctaatggtacttgacatcttgt

SEQ ID NO: 2055 - DNA, 76 bp, synthetic construct
  source 1..76: mol_type = other DNA
atgagcatcatccacttgttaagcaatctctggtcgatttgtagcgaaggctactgcccaagagttgacaaactgt

SEQ ID NO: 2056 - DNA, 76 bp, synthetic construct
  source 1..76: mol_type = other DNA
atgagcatcgtccacctgttgttcaatctctgctcggcgtgttgcgaaactcgctggccgggactggacaaactgt

SEQ ID NO: 2057 - DNA, 85 bp, synthetic construct
  source 1..85: mol_type = other DNA
atgacttgtaacctcatcaactggacgttatcaatacttaggcttgcatcagcgttgagctgtgctgccggtgttgacaacttgt

SEQ ID NO: 2058 - DNA, 73 bp, synthetic construct
  source 1..73: mol_type = other DNA
ttgcggaatcctgtcatcgctctgctatcaatcgtcctggcgatcacgctgccggtcggacttgacaacttgt

SEQ ID NO: 2059 - DNA, 79 bp, synthetic construct
  source 1..79: mol_type = other DNA
atgaatctactaatcatctgcggctatgcaagtcgtctactcgccagtgttctggttcgtattctacttgacagcttgt

SEQ ID NO: 2060 - DNA, 108 bp, synthetic construct; identical to SEQ ID NO: 2040
  source 1..108: mol_type = other DNA

SEQ ID NO: 2061 - DNA, 88 bp, synthetic construct; identical to SEQ ID NO: 1914
  source 1..88: mol_type = other DNA

SEQ ID NO: 2062 - DNA, 86 bp, synthetic construct; identical to SEQ ID NO: 1828
  source 1..86: mol_type = other DNA

SEQ ID NO: 2063 - DNA, 79 bp, synthetic construct; identical to SEQ ID NO: 1819
  source 1..79: mol_type = other DNA

SEQ ID NO: 2064 - DNA, 88 bp, synthetic construct; identical to SEQ ID NO: 1914
  source 1..88: mol_type = other DNA

SEQ ID NO: 2065 - DNA, 12 bp, synthetic construct
  source 1..12: mol_type = other DNA
ttgacaggagta

SEQ ID NO: 2066 - DNA, 79 bp, synthetic construct
  source 1..79: mol_type = other DNA
atgacggaaatcctgttctacgcgttgtcagctttgcgtctctgctcgtggagcggattcgcggcgcttgacaacctgt

SEQ ID NO: 2067 - DNA, 79 bp, synthetic construct; identical to SEQ ID NO: 1829
  source 1..79: mol_type = other DNA

SEQ ID NO: 2068 - DNA, 61 bp, synthetic construct
  source 1..61: mol_type = other DNA
atggaggtcctgatggacatcgtagcaatactgctggcagctttcgggcttgacagcttca

SEQ ID NO: 2069 - DNA, 103 bp, synthetic construct
  source 1..103: mol_type = other DNA
atgtattgccggtatgctggcaaagcacgctggtggttaacaatcggagttccagttatggaaatctttatgaaagttcactcaggaaaccttgacagtgtaa

SEQ ID NO: 2070 - DNA, 76 bp, synthetic construct
  source 1..76: mol_type = other DNA
gtgagcatcatccacttgttggtcagcctctgggcggtgtgcagcgaagtgcgctatccggaagttgacaaactgt

SEQ ID NO: 2071 - DNA, 33 bp, synthetic construct
  source 1..33: mol_type = other DNA
atgaataaattcggcataacagcattgacaaca

SEQ ID NO: 2072 - DNA, 121 bp, synthetic construct
  source 1..121: mol_type = other DNA
atggcaatcttacgcttcatgacaatgtgtttatcttggctctgcaaggataaaggcattgacaatctgttagaaatgatatataatgtaatctgcgatggagactatacaatggcaatct

SEQ ID NO: 2073 - DNA, 70 bp, synthetic construct; identical to SEQ ID NO: 1838
  source 1..70: mol_type = other DNA

SEQ ID NO: 2074 - DNA, 76 bp, synthetic construct; identical to SEQ ID NO: 1832
  source 1..76: mol_type = other DNA

SEQ ID NO: 2075 - DNA, 70 bp, synthetic construct; identical to SEQ ID NO: 1838
  source 1..70: mol_type = other DNA

SEQ ID NO: 2076 - DNA, 94 bp, synthetic construct
  source 1..94: mol_type = other DNA
atggaggtatccatgaagattctcgcatgcgtggtgttgtcaatattctcagtatacctcggaggcacgccaataattacgcttgacaacctgt

SEQ ID NO: 2077 - DNA, 91 bp, synthetic construct
  source 1..91: mol_type = other DNA
atgaagataagtctccgtgggctgttggccgcattgctggtaatcgtaggatgttattcctccggaaccgccttggggcttgacagcttgt

SEQ ID NO: 2078 - DNA, 28 bp, synthetic construct
  source 1..28: mol_type = other DNA
atgttattgagtaggtttgacagcctgt

SEQ ID NO: 2079 - DNA, 76 bp, synthetic construct
  source 1..76: mol_type = other DNA
atgagcgtcatccaagtgctgtataccgtctggtcggcgtgctgtgaagaacgctgcccatggcttgacaacctgt

SEQ ID NO: 2080 - DNA, 73 bp, synthetic construct; identical to SEQ ID NO: 1834
  source 1..73: mol_type = other DNA

SEQ ID NO: 2081 - DNA, 70 bp, synthetic construct
  source 1..70: mol_type = other DNA
atgataatcttacacctcatggcaatgttgttttcttggcgaaccagagagcgatgcattgacaatctgt

SEQ ID NO: 2082 - DNA, 70 bp, synthetic construct; identical to SEQ ID NO: 1838
  source 1..70: mol_type = other DNA

SEQ ID NO: 2083 - DNA, 34 bp, synthetic construct
  source 1..34: mol_type = other DNA
ttgaagctaaagataacgtcagacttgacattaa

SEQ ID NO: 2084 - DNA, 52 bp, synthetic construct
  source 1..52: mol_type = other DNA
ttggatcaattactcattcagttattcgtcaacatttgccttgacagtttca

SEQ ID NO: 2085 - DNA, 76 bp, synthetic construct
  source 1..76: mol_type = other DNA
atgctgcccttaccggtcgccctgtcattcaagataacatgtcatattgacatcattatattgcttgacatcctgt

SEQ ID NO: 2086 - DNA, 68 bp, synthetic construct
  source 1..68: mol_type = other DNA
atgacaggaagattctttgctacatcaatgtttctgttggctctcgccgcaggaaaccttgacttggc

SEQ ID NO: 2087 - DNA, 79 bp, synthetic construct
  source 1..79: mol_type = other DNA
atgacggaaatcgcggtctatgtgttgtctgctctgcgtctatgctcttcgagcaattcggcgtggcttgacaacctgt

SEQ ID NO: 2088 - DNA, 76 bp, synthetic construct
  source 1..76: mol_type = other DNA
atgagcatcatccacttgttaatcagcctctgtgaggtgttcagcgaaagtagctgtccgagagttgacaaactgt

SEQ ID NO: 2089 - DNA, 82 bp, synthetic construct
  source 1..82: mol_type = other DNA
atgaagacgcttatccacatgatcttgtcactgtcattctgttcagtaagcttactgagcaggtttgacattgacatcttgt

SEQ ID NO: 2090 - DNA, 70 bp, synthetic construct
  source 1..70: mol_type = other DNA
atgataatcgtacacctcatgacaatgttgttgtcttggctcagcaagcgcaacggcattgacaatctgt

SEQ ID NO: 2091 - DNA, 105 bp, synthetic construct
  source 1..105: mol_type = other DNA
gtgattagtttactcaatgtagaagatccatgcttcgcagtctcggttctccacatctggtggtttagggagtttattaacgttcataaacttgctaaacctaga

SEQ ID NO: 2092 - DNA, 76 bp, synthetic construct; identical to SEQ ID NO: 2070
  source 1..76: mol_type = other DNA

SEQ ID NO: 2093 - DNA, 70 bp, synthetic construct
  source 1..70: mol_type = other DNA
atgataatcttacacctgatgacaatgttgattccttggcgtaccagagaacgatgcattgacaatctgt

SEQ ID NO: 2094 - DNA, 40 bp, synthetic construct
  source 1..40: mol_type = other DNA
atgcgcgacaccaacgagaaattagctgttgacggtataa

SEQ ID NO: 2095 - DNA, 64 bp, synthetic construct
  source 1..64: mol_type = other DNA
atggagatcataatggacctcgtcactctgatactgctggctcacttcgggcttgacagtttca

SEQ ID NO: 2096 - DNA, 49 bp, synthetic construct
  source 1..49: mol_type = other DNA
ttgctgtcattctgctcaataagcttattgagtaggtttgacagcctgt

SEQ ID NO: 2097 - DNA, 79 bp, synthetic construct
  source 1..79: mol_type = other DNA
atgagtctagtaagcacctgccatagcttcaagcagcttatcttccagttactggttcagatagcacttgacagcttgt

SEQ ID NO: 2098 - DNA, 76 bp, synthetic construct; identical to SEQ ID NO: 1952
  source 1..76: mol_type = other DNA

SEQ ID NO: 2099 - DNA, 79 bp, synthetic construct
  source 1..79: mol_type = other DNA
gtgaccgcaacgacgaaaggatacttacaggtgattataaatatcgcgctcgggctgctggtcggccttgacagtgata

SEQ ID NO: 2100 - DNA, 73 bp, synthetic construct; identical to SEQ ID NO: 2036
  source 1..73: mol_type = other DNA

SEQ ID NO: 2101 - DNA, 106 bp, synthetic construct
  source 1..106: mol_type = other DNA
atgtgctggcgaccgtgcagccgaccggcgtccaacctggcaataggagcccaactcatggaactcgcactttgcaccgaattggccacgggccttgacagtgtaa

SEQ ID NO: 2102 - DNA, 64 bp, synthetic construct
  source 1..64: mol_type = other DNA
atgcggacactcatagctacgctgtcatgcttgacgaattgcttcggttggcttgacatcctgt

SEQ ID NO: 2103 - DNA, 76 bp, synthetic construct; identical to SEQ ID NO: 1847
  source 1..76: mol_type = other DNA

SEQ ID NO: 2104 - DNA, 43 bp, synthetic construct; identical to SEQ ID NO: 1934
  source 1..43: mol_type = other DNA

SEQ ID NO: 2105 - DNA, 79 bp, synthetic construct; identical to SEQ ID NO: 2052
  source 1..79: mol_type = other DNA

SEQ ID NO: 2106 - DNA, 76 bp, synthetic construct; identical to SEQ ID NO: 1853
  source 1..76: mol_type = other DNA

SEQ ID NO: 2107 - DNA, 103 bp, synthetic construct; identical to SEQ ID NO: 2069
  source 1..103: mol_type = other DNA

SEQ ID NO: 2108 - DNA, 88 bp, synthetic construct; identical to SEQ ID NO: 1914
  source 1..88: mol_type = other DNA

SEQ ID NO: 2109 - DNA, 76 bp, synthetic construct
  source 1..76: mol_type = other DNA
atgagcatcgtccacctgttggtcagcctctggtcggtgtgcagcgaaggtcgctggccgggagttgacaaactgt

SEQ ID NO: 2110 - DNA, 91 bp, synthetic construct
  source 1..91: mol_type = other DNA
atgagaataagtatccgagcgctggtgtctgcactgctggtcaccctgggttatttcacctgtggtgccgcgatgggacttgacagcttgt

SEQ ID NO: 2111 - DNA, 73 bp, synthetic construct
  source 1..73: mol_type = other DNA
atgattcgattagtctcgtcaatccatgcattggcgaccattgtgggagccatggctggtattgacaacctgt

SEQ ID NO: 2112 - DNA, 109 bp, synthetic construct
  source 1..109: mol_type = other DNA
atgtggtattgccggattgccgcaaagccgcccgcgtggctggcgaaaggagcccgaattatggaactcgcaatctgcaccgccccggaagttggccttgacagtttaa

SEQ ID NO: 2113 - DNA, 81 bp, synthetic construct
  source 1..81: mol_type = other DNA
gtgatattgttgaaactaatcgtagcctttctggctcgcttcgttattacaatatctcttaacaaactgctggacagttca

SEQ ID NO: 2114 - DNA, 55 bp, synthetic construct
  source 1..55: mol_type = other DNA
gtgagtaacctgctcgaactgctcagctgtcttgcgaattgccttgacagttaca

SEQ ID NO: 2115 - DNA, 81 bp, synthetic construct
  source 1..81: mol_type = other DNA
gtgatattgttgaaactaatcgtagcctttctagctcgcttcgttattacaatatctcttaacaaactgctggacagttca

SEQ ID NO: 2116 - DNA, 67 bp, synthetic construct
  source 1..67: mol_type = other DNA
atgaagttgaacatccaagtagagctgtcaagtttgaccggcgaggccgggtggcttgacatcctgt

SEQ ID NO: 2117 - DNA, 85 bp, synthetic construct
  source 1..85: mol_type = other DNA
atgattatgataaccttattaatcttacgcttcatgacgatgtgcgtgttcttccgacggaagaacaaatacattgacaatctgt

SEQ ID NO: 2118 - DNA, 52 bp, synthetic construct
  source 1..52: mol_type = other DNA
atgacaacgtgcgtgttcttccagcggaagaacaggtacattgacaatctgt

SEQ ID NO: 2119 - DNA, 91 bp, synthetic construct; identical to SEQ ID NO: 1965
  source 1..91: mol_type = other DNA

SEQ ID NO: 2120 - DNA, 91 bp, synthetic construct
  source 1..91: mol_type = other DNA
atgatacttatgaacataatgaaattaatatttagtctctggtcattagtcaaaacaatttcagaaatagtttcaacacttgacattctgt

SEQ ID NO: 2121 - DNA, 88 bp, synthetic construct
  source 1..88: mol_type = other DNA
atgtttcagctaatcgttgtgtgcggctgctcaaggcatgtggtcaccagttattgttgctggttccaattgctacttgacagcttgt

SEQ ID NO: 2122 - DNA, 88 bp, synthetic construct
  source 1..88: mol_type = other DNA
atgtttcagctaatcgttatgtgcggctgctcaaggcatgtggtcaccagttatggttgctggttccaattgctacttgacagcttgt

SEQ ID NO: 2123 - DNA, 61 bp, synthetic construct
  source 1..61: mol_type = other DNA
atggaggtcctgatggacatcatagcaatactgctggcagctttcgggcttgacagcttca

SEQ ID NO: 2124 - DNA, 52 bp, synthetic construct
  source 1..52: mol_type = other DNA
atgatcgaactcgcgtcctgcactgacctcgggacaagccttgacagtataa

SEQ ID NO: 2125 - DNA, 88 bp, synthetic construct
  source 1..88: mol_type = other DNA
atgagtatcacccgtttgctggtcgccttcaccatgatcatcataagtattactactggtatgacattctgggggcttgacagcctgt

SEQ ID NO: 2126 - DNA, 88 bp, synthetic construct
  source 1..88: mol_type = other DNA
atgacaataatcattatcaaattctttattagtttatgttcagtagctgaaacgctttatgaaatgttatcaactattgacatactgt

SEQ ID NO: 2127 - DNA, 88 bp, synthetic construct; identical to SEQ ID NO: 2126
  source 1..88: mol_type = other DNA

SEQ ID NO: 2128 - DNA, 88 bp, synthetic construct; identical to SEQ ID NO: 2126
  source 1..88: mol_type = other DNA

SEQ ID NO: 2129 - DNA, 76 bp, synthetic construct; identical to SEQ ID NO: 1840
  source 1..76: mol_type = other DNA

SEQ ID NO: 2130 - DNA, 76 bp, synthetic construct; identical to SEQ ID NO: 1840
  source 1..76: mol_type = other DNA

SEQ ID NO: 2131 - DNA, 86 bp, synthetic construct
  source 1..86: mol_type = other DNA
atgccaagttacttagaagcattatcgattgtacttagctcggtaaatcttaccgttacaattgagataaggcttgcaagaagttc

SEQ ID NO: 2132 - DNA, 94 bp, synthetic construct
  source 1..94: mol_type = other DNA
atgacaatagtctatgccatgcgtttcctgttaataatactgtcatggtctatggcaactttcgaagcctataatgaccttgacagtctgctga

SEQ ID NO: 2133 - DNA, 79 bp, synthetic construct
  source 1..79: mol_type = other DNA
atgagtctactagccatctgcggccatgcaagtcgtctgctagccagtgtactggtgagcgttctacttgacagcttgt

SEQ ID NO: 2134 - DNA, 88 bp, synthetic construct; identical to SEQ ID NO: 1914
  source 1..88: mol_type = other DNA

SEQ ID NO: 2135 - DNA, 88 bp, synthetic construct; identical to SEQ ID NO: 1914
  source 1..88: mol_type = other DNA

SEQ ID NO: 2136 - DNA, 94 bp, synthetic construct
  source 1..94: mol_type = other DNA
atgacaatagtctatgccatgcgtttcctgttggtaatactgtcatggtctatggcaactttcgaagcctataatgaccttgacagtctgctga

SEQ ID NO: 2137 - DNA, 49 bp, synthetic construct; identical to SEQ ID NO: 1871
  source 1..49: mol_type = other DNA

SEQ ID NO: 2138 - DNA, 109 bp, synthetic construct
  source 1..109: mol_type = other DNA
atgtggtattgccaaattgccgcaaagccgcccgcgtggctggcgagaggagcccgaatgatcgaactcgcgtcatgcaccggctgcgaaactggccttgacagtttaa

SEQ ID NO: 2139 - DNA, 109 bp, synthetic construct
  source 1..109: mol_type = other DNA
atgtggtattgccggattgccgcaaagccgcccgcgtggctggcgagaggagcccgaatgatcgaactcgcgtcttgcaccggctgcgaaactggccttgacagtttaa

SEQ ID NO: 2140 - DNA, 109 bp, synthetic construct
  source 1..109: mol_type = other DNA
atgtggtattgccggattgccgcaaagccgcccgcgtggctggcgagaggagcccgaatgatcgaactcgcgatctgcaccggcagcgaaactggccttgacagtttaa

SEQ ID NO: 2141 - DNA, 109 bp, synthetic construct
  source 1..109: mol_type = other DNA
atgtggtattgccggactgccgcaaagccgcccgcgtggctggcgagaggagcccaaatgctggaactcacgatctgcaccggctgcgaaactggccttgacagtttaa

SEQ ID NO: 2142 - DNA, 70 bp, synthetic construct
  source 1..70: mol_type = other DNA
atgttcagcattccaatatcaatagcgttcaagtttcgcttgaaatatcaagttctgcttgacatcctgt

SEQ ID NO: 2143 - DNA, 182 bp, synthetic construct
  source 1..182: mol_type = other DNA
atgataattcaacaattctgcttctttcttcctttattggttgaaataatacagctgaacagcattcttacgaatgtattcactggagttatcgcgtgcattgcacaagaaatgattgcattagcagtcgaaaatacaataatgtatattcgaaagaatgctgttcagctcttgacaataat

SEQ ID NO: 2144 - DNA, 58 bp, synthetic construct
  source 1..58: mol_type = other DNA
atgtgcgtcatccgcgcatgcgtcgaagccgtcgcgaactggtcgcttgacaccgtca

SEQ ID NO: 2145 - DNA, 28 bp, synthetic construct
  source 1..28: mol_type = other DNA
atggttcaggtagcccttgacagcttgt

SEQ ID NO: 2146 - DNA, 70 bp, synthetic construct
  source 1..70: mol_type = other DNA
atggtaatcttacgcttcatgacgatgtgtttatcttggttctgcaaggataaatacattgacaatctgt

SEQ ID NO: 2147 - DNA, 84 bp, synthetic construct
  source 1..84: mol_type = other DNA
gtggtgatattgttgaaactaatcgtagcctttctggctcgcttcgttattacaatatctcttaacaaactgctggacagttca

SEQ ID NO: 2148 - DNA, 84 bp, synthetic construct; identical to SEQ ID NO: 2147
  source 1..84: mol_type = other DNA

SEQ ID NO: 2149 - DNA, 76 bp, synthetic construct
  source 1..76: mol_type = other DNA
atgagcatcgtccacctgttggtcagcctctggtcggtttgcaacgaaggtcgctggccggaagtcgacaaactgt

SEQ ID NO: 2150 - DNA, 88 bp, synthetic construct; identical to SEQ ID NO: 1914
  source 1..88: mol_type = other DNA

SEQ ID NO: 2151 - DNA, 86 bp, synthetic construct
  source 1..86: mol_type = other DNA
atgaacatccctgtccagatgaatctgtggtctttgctcacagtagagttggcgacggcggtggccggagccaaactttactttgc

SEQ ID NO: 2152 - DNA, 88 bp, synthetic construct
  source 1..88: mol_type = other DNA
atgcctattgttataaatactattatgtgtagtattgccagttgtgcgattgccaagttcttggaaatcgtactgcttgacagcatgt

SEQ ID NO: 2153 - DNA, 70 bp, synthetic construct
  source 1..70: mol_type = other DNA
atggtaatcttacgcttcatgacaatgtgtttatcttggctctgcaaggataaagtcattgacaatctgt

SEQ ID NO: 2154 - DNA, 88 bp, synthetic construct
  source 1..88: mol_type = other DNA
gtgctcagcgagttatcagcatggatagtggtggtgctatgcaatatagcgttgaaccatctcagtgattatttgcttgacaaggtca

SEQ ID NO: 2155 - DNA, 61 bp, synthetic construct
  source 1..61: mol_type = other DNA
atggaggtccttgtggacatcatagcgatactgctggcaactttcgggcttgacagcttca

SEQ ID NO: 2156 - DNA, 110 bp, synthetic construct
  source 1..110: mol_type = other DNA
gtgctgatatggctgtctggcgctccagaagcgtttctagtactcgcaattctggtgatcaccgacgagcttggcgaggtgataaatatttatcaacttgacaagcgaga

SEQ ID NO: 2157 - DNA, 107 bp, synthetic construct
  source 1..107: mol_type = other DNA
gtgataagtttgactgacttgccagacctgcaactactgttactgtatctagaaatcatatggcagcttggtgaggttcttaacgttaagaaacttgccaagcatga

SEQ ID NO: 2158 - DNA, 76 bp, synthetic construct
  source 1..76: mol_type = other DNA
atgaatgcaatcatcattctcggctggcggatggcaagtatcctgctcggaataaccgaagggcttgacatcctgc

SEQ ID NO: 2159 - DNA, 49 bp, synthetic construct
  source 1..49: mol_type = other DNA
atggacatctttacactactgctggcaaccttcgggcttgacagcttca

SEQ ID NO: 2160 - DNA, 49 bp, synthetic construct; identical to SEQ ID NO: 2159
  source 1..49: mol_type = other DNA

SEQ ID NO: 2161 - DNA, 49 bp, synthetic construct; identical to SEQ ID NO: 2159
  source 1..49: mol_type = other DNA

SEQ ID NO: 2162 - DNA, 49 bp, synthetic construct
  source 1..49: mol_type = other DNA
atggacatctttacaatactgctggcaaccttcgggcttgacagcttca

SEQ ID NO: 2163 - DNA, 110 bp, synthetic construct; identical to SEQ ID NO: 1968
  source 1..110: mol_type = other DNA

SEQ ID NO: 2164 - DNA, 76 bp, synthetic construct
  source 1..76: mol_type = other DNA
atgagtatcgtccacctgttagtcagcctctggtcggtgttcagcgaaggtcgctggccgggagttgccaaactgt

SEQ ID NO: 2165 - DNA, 76 bp, synthetic construct; identical to SEQ ID NO: 1845
  source 1..76: mol_type = other DNA

SEQ ID NO: 2166 - DNA, 67 bp, synthetic construct
  source 1..67: mol_type = other DNA
atgaggctgagattccaagttcagtggtcaagtttgcccggcatggccggatggcttgacatcctgt

SEQ ID NO: 2167 - DNA, 43 bp, synthetic construct
  source 1..43: mol_type = other DNA
atggcggctcttgtgagcgcatcattcagctttgacgagctgt

SEQ ID NO: 2168 - DNA, 84 bp, synthetic construct; identical to SEQ ID NO: 2147
  source 1..84: mol_type = other DNA

SEQ ID NO: 2169 - DNA, 108 bp, synthetic construct
  source 1..108: mol_type = other DNA
atgatcacaaaccacttgctaatgatactgttagtgttgaaaccatggattgccttaatggctaggttcattattacaatacttcttaacaaactgcttgacagttca

SEQ ID NO: 2170 - DNA, 109 bp, synthetic construct
  source 1..109: mol_type = other DNA
gtgttctctgtccggctcagcctttgtttcggcgaactgaatgagcttctgaacatagttctgggtgctggtaacgttaccggcaccagaacggttgtcccgattctaa

SEQ ID NO: 2171 - DNA, 79 bp, synthetic construct
  source 1..79: mol_type = other DNA
atgaatctactagtcatctgcggctatgcaagtcgtctgctcgccagtattctggttcgtattctacttgacagcttgt

SEQ ID NO: 2172 - DNA, 49 bp, synthetic construct
  source 1..49: mol_type = other DNA
atggaactcgcgatctgcaccggcccggaagctggccttgacagtttaa

SEQ ID NO: 2173 - DNA, 79 bp, synthetic construct
  source 1..79: mol_type = other DNA
gtgtccttgcggaatcccgtcgtcactctgttatcacttgtcctggcttggctgcagctgggcgaagttgacaacttgt

SEQ ID NO: 2174 - DNA, 91 bp, synthetic construct
  source 1..91: mol_type = other DNA
atgacaaattatgccattcgtttcctgttgatagtcgtgtcattgctttacgcgggtctagaggcctgcgtagaacttgacagtttactga

SEQ ID NO: 2175 - DNA, 86 bp, synthetic construct
  source 1..86: mol_type = other DNA
atgccaagttattcagaagcgttatcgattgtaatcgactggataagtattatgattacaattgagataaagcttgacagaaattc

SEQ ID NO: 2176 - DNA, 81 bp, synthetic construct
  source 1..81: mol_type = other DNA
gtgatattattgcaacaaatcgtagccagtgtggctcgctttgttattataacttctctaaatctactgctggacagttca

SEQ ID NO: 2177 - DNA, 79 bp, synthetic construct; identical to SEQ ID NO: 1789
  source 1..79: mol_type = other DNA

SEQ ID NO: 2178 - DNA, 79 bp, synthetic construct; identical to SEQ ID NO: 1789
  source 1..79: mol_type = other DNA

SEQ ID NO: 2179 - DNA, 79 bp, synthetic construct; identical to SEQ ID NO: 1791
  source 1..79: mol_type = other DNA

SEQ ID NO: 2180 - DNA, 79 bp, synthetic construct; identical to SEQ ID NO: 1789
  source 1..79: mol_type = other DNA

SEQ ID NO: 2181 - DNA, 79 bp, synthetic construct; identical to SEQ ID NO: 1795
  source 1..79: mol_type = other DNA

SEQ ID NO: 2182 - DNA, 91 bp, synthetic construct; identical to SEQ ID NO: 1796
  source 1..91: mol_type = other DNA

SEQ ID NO: 2183 - DNA, 79 bp, synthetic construct; identical to SEQ ID NO: 1798
  source 1..79: mol_type = other DNA

SEQ ID NO: 2184 - DNA, 91 bp, synthetic construct; identical to SEQ ID NO: 1800
  source 1..91: mol_type = other DNA

SEQ ID NO: 2185 - DNA, 91 bp, synthetic construct; identical to SEQ ID NO: 1796
  source 1..91: mol_type = other DNA

SEQ ID NO: 2186 - DNA, 79 bp, synthetic construct; identical to SEQ ID NO: 1802
  source 1..79: mol_type = other DNA

SEQ ID NO: 2187 - DNA, 79 bp, synthetic construct; identical to SEQ ID NO: 1807
  source 1..79: mol_type = other DNA

SEQ ID NO: 2188 - DNA, 79 bp, synthetic construct; identical to SEQ ID NO: 1798
  source 1..79: mol_type = other DNA

SEQ ID NO: 2189 - DNA, 79 bp, synthetic construct; identical to SEQ ID NO: 1798
  source 1..79: mol_type = other DNA

SEQ ID NO: 2190 - DNA, 79 bp, synthetic construct; identical to SEQ ID NO: 1810
  source 1..79: mol_type = other DNA

SEQ ID NO: 2191 - DNA, 79 bp, synthetic construct; identical to SEQ ID NO: 1811
  source 1..79: mol_type = other DNA

SEQ ID NO: 2192 - DNA, 79 bp, synthetic construct; identical to SEQ ID NO: 1812
  source 1..79: mol_type = other DNA

SEQ ID NO: 2193 - DNA, 79 bp, synthetic construct; identical to SEQ ID NO: 1815
  source 1..79: mol_type = other DNA

SEQ ID NO: 2194 - DNA, 79 bp, synthetic construct; identical to SEQ ID NO: 1795
  source 1..79: mol_type = other DNA

SEQ ID NO: 2195 - DNA, 79 bp, synthetic construct; identical to SEQ ID NO: 1795
  source 1..79: mol_type = other DNA

SEQ ID NO: 2196 - DNA, 79 bp, synthetic construct; identical to SEQ ID NO: 1789
  source 1..79: mol_type = other DNA

SEQ ID NO: 2197 - DNA, 79 bp, synthetic construct; identical to SEQ ID NO: 1789
  source 1..79: mol_type = other DNA

SEQ ID NO: 2198 - DNA, 79 bp, synthetic construct; identical to SEQ ID NO: 1810
  source 1..79: mol_type = other DNA

SEQ ID NO: 2199 - DNA, 79 bp, synthetic construct; identical to SEQ ID NO: 1789
  source 1..79: mol_type = other DNA

SEQ ID NO: 2200 - DNA, 79 bp, synthetic construct; identical to SEQ ID NO: 1819
  source 1..79: mol_type = other DNA

SEQ ID NO: 2201 - DNA, 79 bp, synthetic construct; identical to SEQ ID NO: 1812
  source 1..79: mol_type = other DNA

SEQ ID NO: 2202 - DNA, 79 bp, synthetic construct; identical to SEQ ID NO: 1812
  source 1..79: mol_type = other DNA

SEQ ID NO: 2203 - DNA, 79 bp, synthetic construct; identical to SEQ ID NO: 1812
  source 1..79: mol_type = other DNA

SEQ ID NO: 2204 - DNA, 79 bp, synthetic construct; identical to SEQ ID NO: 1810
  source 1..79: mol_type = other DNA

SEQ ID NO: 2205 - DNA, 79 bp, synthetic construct; identical to SEQ ID NO: 1802
  source 1..79: mol_type = other DNA

SEQ ID NO: 2206 - DNA, 79 bp, synthetic construct; identical to SEQ ID NO: 1807
  source 1..79: mol_type = other DNA

SEQ ID NO: 2207 - DNA, 79 bp, synthetic construct; identical to SEQ ID NO: 1807
  source 1..79: mol_type = other DNA

SEQ ID NO: 2208 - DNA, 91 bp, synthetic construct; identical to SEQ ID NO: 1823
  source 1..91: mol_type = other DNA

SEQ ID NO: 2209 - DNA, 79 bp, synthetic construct; identical to SEQ ID NO: 1812
  source 1..79: mol_type = other DNA

SEQ ID NO: 2210 - DNA, 79 bp, synthetic construct; identical to SEQ ID NO: 1812
  source 1..79: mol_type = other DNA

SEQ ID NO: 2211 - DNA, 79 bp, synthetic construct; identical to SEQ ID NO: 1812
  source 1..79: mol_type = other DNA

SEQ ID NO: 2212 - DNA, 73 bp, synthetic construct; identical to SEQ ID NO: 1834
  source 1..73: mol_type = other DNA

SEQ ID NO: 2213 - DNA, 73 bp, synthetic construct; identical to SEQ ID NO: 1834
  source 1..73: mol_type = other DNA

SEQ ID NO: 2214 - DNA, 76 bp, synthetic construct; identical to SEQ ID NO: 1841
  source 1..76: mol_type = other DNA

SEQ ID NO: 2215 - DNA, 73 bp, synthetic construct; identical to SEQ ID NO: 1836
  source 1..73: mol_type = other DNA

SEQ ID NO: 2216 - DNA, 76 bp, synthetic construct; identical to SEQ ID NO: 1832
  source 1..76: mol_type = other DNA

SEQ ID NO: 2217 - DNA, 76 bp, synthetic construct; identical to SEQ ID NO: 1832
  source 1..76: mol_type = other DNA

SEQ ID NO: 2218 - DNA, 76 bp, synthetic construct; identical to SEQ ID NO: 1841
  source 1..76: mol_type = other DNA

SEQ ID NO: 2219 - DNA, 70 bp, synthetic construct; identical to SEQ ID NO: 1850
  source 1..70: mol_type = other DNA

SEQ ID NO: 2220 - DNA, 70 bp, synthetic construct; identical to SEQ ID NO: 1850
  source 1..70: mol_type = other DNA

SEQ ID NO: 2221 - DNA, 70 bp, synthetic construct; identical to SEQ ID NO: 1850
  source 1..70: mol_type = other DNA

SEQ ID NO: 2222 - DNA, 70 bp, synthetic construct; identical to SEQ ID NO: 1850
  source 1..70: mol_type = other DNA

SEQ ID NO: 2223 - DNA, 76 bp, synthetic construct; identical to SEQ ID NO: 1832
  source 1..76: mol_type = other DNA

SEQ ID NO: 2224 - DNA, 73 bp, synthetic construct; identical to SEQ ID NO: 1851
  source 1..73: mol_type = other DNA

SEQ ID NO: 2225 - DNA, 79 bp, synthetic construct; identical to SEQ ID NO: 1858
  source 1..79: mol_type = other DNA

SEQ ID NO: 2226 - DNA, 91 bp, synthetic construct; identical to SEQ ID NO: 1863
  source 1..91: mol_type = other DNA

SEQ ID NO: 2227 - DNA, 91 bp, synthetic construct; identical to SEQ ID NO: 1863
  source 1..91: mol_type = other DNA

SEQ ID NO: 2228 - DNA, 70 bp, synthetic construct; identical to SEQ ID NO: 1881
  source 1..70: mol_type = other DNA

SEQ ID NO: 2229 - DNA, 76 bp, synthetic construct; identical to SEQ ID NO: 1884
  source 1..76: mol_type = other DNA

SEQ ID NO: 2230 - DNA, 79 bp, synthetic construct; identical to SEQ ID NO: 1885
  source 1..79: mol_type = other DNA

SEQ ID NO: 2231 - DNA, 76 bp, synthetic construct; identical to SEQ ID NO: 1886
  source 1..76: mol_type = other DNA

SEQ ID NO: 2232 - DNA, 79 bp, synthetic construct; identical to SEQ ID NO: 1812
  source 1..79: mol_type = other DNA

SEQ ID NO: 2233 - DNA, 79 bp, synthetic construct; identical to SEQ ID NO: 1812
  source 1..79: mol_type = other DNA

SEQ ID NO: 2234 - DNA, 88 bp, synthetic construct; identical to SEQ ID NO: 1890
  source 1..88: mol_type = other DNA

SEQ ID NO: 2235 - DNA, 88 bp, synthetic construct; identical to SEQ ID NO: 1890
  source 1..88: mol_type = other DNA

SEQ ID NO: 2236 - DNA, 88 bp, synthetic construct; identical to SEQ ID NO: 1890
  source 1..88: mol_type = other DNA

SEQ ID NO: 2237 - DNA, 88 bp, synthetic construct; identical to SEQ ID NO: 1891
  source 1..88: mol_type = other DNA

SEQ ID NO: 2238 - DNA, 91 bp, synthetic construct; identical to SEQ ID NO: 1898
  source 1..91: mol_type = other DNA

SEQ ID NO: 2239 - DNA, 91 bp, synthetic construct; identical to SEQ ID NO: 1863
  source 1..91: mol_type = other DNA

SEQ ID NO: 2240 - DNA, 91 bp, synthetic construct; identical to SEQ ID NO: 1863
  source 1..91: mol_type = other DNA

SEQ ID NO: 2241 - DNA, 91 bp, synthetic construct; identical to SEQ ID NO: 1823
  source 1..91: mol_type = other DNA

SEQ ID NO: 2242 - DNA, 91 bp, synthetic construct; identical to SEQ ID NO: 1904
  source 1..91: mol_type = other DNA

SEQ ID NO: 2243 - DNA, 91 bp, synthetic construct; identical to SEQ ID NO: 1823
  source 1..91: mol_type = other DNA

SEQ ID NO: 2244 - DNA, 91 bp, synthetic construct; identical to SEQ ID NO: 1907
  source 1..91: mol_type = other DNA

SEQ ID NO: 2245 - DNA, 79 bp, synthetic construct; identical to SEQ ID NO: 1866
  source 1..79: mol_type = other DNA

SEQ ID NO: 2246 - DNA, 88 bp, synthetic construct
  source 1..88: mol_type = other DNA
atgacaataatcatcatacatttcctgtggatagccctgtcttggttggcggcaagtttccaagcctaccttgaccttgacagtctgc

SEQ ID NO: 2247 - DNA, 88 bp, synthetic construct; identical to SEQ ID NO: 2246
  source 1..88: mol_type = other DNA

SEQ ID NO: 2248 - DNA, 79 bp, synthetic construct; identical to SEQ ID NO: 1812
  source 1..79: mol_type = other DNA

SEQ ID NO: 2249 - DNA, 79 bp, synthetic construct; identical to SEQ ID NO: 1913
  source 1..79: mol_type = other DNA

SEQ ID NO: 2250 - DNA, 73 bp, synthetic construct; identical to SEQ ID NO: 1915
  source 1..73: mol_type = other DNA

SEQ ID NO: 2251 - DNA, 79 bp, synthetic construct; identical to SEQ ID NO: 1819
  source 1..79: mol_type = other DNA

SEQ ID NO: 2252 - DNA, 79 bp, synthetic construct; identical to SEQ ID NO: 1819
  source 1..79: mol_type = other DNA

SEQ ID NO: 2253 - DNA, 70 bp, synthetic construct; identical to SEQ ID NO: 1922
  source 1..70: mol_type = other DNA

SEQ ID NO: 2254 - DNA, 88 bp, synthetic construct; identical to SEQ ID NO: 1924
  source 1..88: mol_type = other DNA

SEQ ID NO: 2255 - DNA, 91 bp, synthetic construct; identical to SEQ ID NO: 1926
  source 1..91: mol_type = other DNA

SEQ ID NO: 2256 - DNA, 91 bp, synthetic construct; identical to SEQ ID NO: 1926
  source 1..91: mol_type = other DNA

SEQ ID NO: 2257 - DNA, 91 bp, synthetic construct; identical to SEQ ID NO: 1926
  source 1..91: mol_type = other DNA

SEQ ID NO: 2258 - DNA, 88 bp, synthetic construct; identical to SEQ ID NO: 1914
  source 1..88: mol_type = other DNA

SEQ ID NO: 2259 - DNA, 88 bp, synthetic construct; identical to SEQ ID NO: 1914
  source 1..88: mol_type = other DNA

SEQ ID NO: 2260 - DNA, 79 bp, synthetic construct; identical to SEQ ID NO: 1795
  source 1..79: mol_type = other DNA

SEQ ID NO: 2261 - DNA, 79 bp, synthetic construct; identical to SEQ ID NO: 1795
  source 1..79: mol_type = other DNA

SEQ ID NO: 2262 - DNA, 79 bp, synthetic construct; identical to SEQ ID NO: 1795
  source 1..79: mol_type = other DNA

SEQ ID NO: 2263 - DNA, 88 bp, synthetic construct; identical to SEQ ID NO: 2246
  source 1..88: mol_type = other DNA

SEQ ID NO: 2264 - DNA, 88 bp, synthetic construct; identical to SEQ ID NO: 2246
  source 1..88: mol_type = other DNA

SEQ ID NO: 2265 - DNA, 88 bp, synthetic construct; identical to SEQ ID NO: 2246
  source 1..88: mol_type = other DNA

SEQ ID NO: 2266 - DNA, 88 bp, synthetic construct
  source 1..88: mol_type = other DNA
atggaagctttacgatgcatcttatgccaattgctttcaggatcattctattggatctattgttccaaagaaagatttgacaatgtat

SEQ ID NO: 2267 - DNA, 91 bp, synthetic construct; identical to SEQ ID NO: 1917
  source 1..91: mol_type = other DNA

SEQ ID NO: 2268 - DNA, 88 bp, synthetic construct; identical to SEQ ID NO: 1945
  source 1..88: mol_type = other DNA

SEQ ID NO: 2269 - DNA, 79 bp, synthetic construct; identical to SEQ ID NO: 1794
  source 1..79: mol_type = other DNA

SEQ ID NO: 2270 - DNA, 76 bp, synthetic construct; identical to SEQ ID NO: 1948
  source 1..76: mol_type = other DNA

SEQ ID NO: 2271 - DNA, 76 bp, synthetic construct; identical to SEQ ID NO: 1949
  source 1..76: mol_type = other DNA

SEQ ID NO: 2272 - DNA, 76 bp, synthetic construct; identical to SEQ ID NO: 1949
  source 1..76: mol_type = other DNA

SEQ ID NO: 2273 - DNA, 76 bp, synthetic construct; identical to SEQ ID NO: 1950
  source 1..76: mol_type = other DNA

SEQ ID NO: 2274 - DNA, 91 bp, synthetic construct; identical to SEQ ID NO: 1863
  source 1..91: mol_type = other DNA

SEQ ID NO: 2275 - DNA, 91 bp, synthetic construct; identical to SEQ ID NO: 1863
  source 1..91: mol_type = other DNA

SEQ ID NO: 2276 - DNA, 76 bp, synthetic construct; identical to SEQ ID NO: 1952
  source 1..76: mol_type = other DNA

SEQ ID NO: 2277 - DNA, 88 bp, synthetic construct; identical to SEQ ID NO: 1953
  source 1..88: mol_type = other DNA

SEQ ID NO: 2278 - DNA, 79 bp, synthetic construct; identical to SEQ ID NO: 1802
  source 1..79: mol_type = other DNA

SEQ ID NO: 2279 - DNA, 79 bp, synthetic construct; identical to SEQ ID NO: 1802
  source 1..79: mol_type = other DNA

SEQ ID NO: 2280 - DNA, 91 bp, synthetic construct; identical to SEQ ID NO: 1826
  source 1..91: mol_type = other DNA

SEQ ID NO: 2281 - DNA, 118 bp, synthetic construct
  source 1..118: mol_type = other DNA
ttggaatcacgttccaagggatgcgaatcatcaacgccatcatcaaggaggttatctcgtggatatgaatatccagtggaaactcagcctcaacgcggggttgacattcagtcaattt

SEQ ID NO: 2282 - DNA, 79 bp, synthetic construct; identical to SEQ ID NO: 1789
  source 1..79: mol_type = other DNA

SEQ ID NO: 2283 - DNA, 79 bp, synthetic construct; identical to SEQ ID NO: 1789
  source 1..79: mol_type = other DNA

SEQ ID NO: 2284 - DNA, 91 bp, synthetic construct; identical to SEQ ID NO: 1863
  source 1..91: mol_type = other DNA

SEQ ID NO: 2285 - DNA, 91 bp, synthetic construct; identical to SEQ ID NO: 1898
  source 1..91: mol_type = other DNA

SEQ ID NO: 2286 - DNA, 91 bp, synthetic construct; identical to SEQ ID NO: 1965
  source 1..91: mol_type = other DNA

SEQ ID NO: 2287 - DNA, 91 bp, synthetic construct; identical to SEQ ID NO: 1863
  source 1..91: mol_type = other DNA

SEQ ID NO: 2288 - DNA, 91 bp, synthetic construct; identical to SEQ ID NO: 1863
  source 1..91: mol_type = other DNA

SEQ ID NO: 2289 - DNA, 82 bp, synthetic construct; identical to SEQ ID NO: 1971
  source 1..82: mol_type = other DNA

SEQ ID NO: 2290 - DNA, 91 bp, synthetic construct; identical to SEQ ID NO: 1863
  source 1..91: mol_type = other DNA

SEQ ID NO: 2291 - DNA, 79 bp, synthetic construct; identical to SEQ ID NO: 1973
  source 1..79: mol_type = other DNA

SEQ ID NO: 2292 - DNA, 70 bp, synthetic construct; identical to SEQ ID NO: 1976
  source 1..70: mol_type = other DNA

SEQ ID NO: 2293 - DNA, 91 bp, synthetic construct; identical to SEQ ID NO: 1823
  source 1..91: mol_type = other DNA

SEQ ID NO: 2294 - DNA, 91 bp, synthetic construct; identical to SEQ ID NO: 1863
  source 1..91: mol_type = other DNA

SEQ ID NO: 2295 - DNA, 91 bp, synthetic construct; identical to SEQ ID NO: 1823
  source 1..91: mol_type = other DNA

SEQ ID NO: 2296 - DNA, 49 bp, synthetic construct; identical to SEQ ID NO: 1982
  source 1..49: mol_type = other DNA

SEQ ID NO: 2297 - DNA, 49 bp, synthetic construct; identical to SEQ ID NO: 1982
  source 1..49: mol_type = other DNA

SEQ ID NO: 2298 - DNA, 91 bp, synthetic construct; identical to SEQ ID NO: 1984
  source 1..91: mol_type = other DNA

SEQ ID NO: 2299 - DNA, 49 bp, synthetic construct; identical to SEQ ID NO: 1982
  source 1..49: mol_type = other DNA

SEQ ID NO: 2300 - DNA, 49 bp, synthetic construct; identical to SEQ ID NO: 1982
  source 1..49: mol_type = other DNA

SEQ ID NO: 2301 - DNA, 49 bp, synthetic construct; identical to SEQ ID NO: 1982
  source 1..49: mol_type = other DNA

SEQ ID NO: 2302 - DNA, 79 bp, synthetic construct; identical to SEQ ID NO: 1829
  source 1..79: mol_type = other DNA

SEQ ID NO: 2303 - DNA, 49 bp, synthetic construct; identical to SEQ ID NO: 1982
  source 1..49: mol_type = other DNA

SEQ ID NO: 2304 - DNA, 91 bp, synthetic construct; identical to SEQ ID NO: 1863
  source 1..91: mol_type = other DNA

SEQ ID NO: 2305 - DNA, 91 bp, synthetic construct; identical to SEQ ID NO: 1993
  source 1..91: mol_type = other DNA

SEQ ID NO: 2306 - DNA, 82 bp, synthetic construct; identical to SEQ ID NO: 1994
  source 1..82: mol_type = other DNA

SEQ ID NO: 2307 - DNA, 91 bp, synthetic construct; identical to SEQ ID NO: 1863
  source 1..91: mol_type = other DNA

SEQ ID NO: 2308 - DNA, 91 bp, synthetic construct; identical to SEQ ID NO: 1863
  source 1..91: mol_type = other DNA

SEQ ID NO: 2309 - DNA, 91 bp, synthetic construct; identical to SEQ ID NO: 1863
  source 1..91: mol_type = other DNA

SEQ ID NO: 2310 - DNA, 91 bp, synthetic construct; identical to SEQ ID NO: 1863
  source 1..91: mol_type = other DNA

SEQ ID NO: 2311 - DNA, 91 bp, synthetic construct; identical to SEQ ID NO: 1863
  source 1..91: mol_type = other DNA

SEQ ID NO: 2312 - DNA, 91 bp, synthetic construct; identical to SEQ ID NO: 1863
  source 1..91: mol_type = other DNA

SEQ ID NO: 2313 - DNA, 91 bp, synthetic construct; identical to SEQ ID NO: 1863
  source 1..91: mol_type = other DNA

SEQ ID NO: 2314 - DNA, 88 bp, synthetic construct; identical to SEQ ID NO: 1996
  source 1..88: mol_type = other DNA

SEQ ID NO: 2315 - DNA, 91 bp, synthetic construct; identical to SEQ ID NO: 2004
  source 1..91: mol_type = other DNA

SEQ ID NO: 2316 - DNA, 79 bp, synthetic construct; identical to SEQ ID NO: 1829
  source 1..79: mol_type = other DNA

SEQ ID NO: 2317 - DNA, 91 bp, synthetic construct; identical to SEQ ID NO: 1903
  source 1..91: mol_type = other DNA

SEQ ID NO: 2318 - DNA, 91 bp, synthetic construct; identical to SEQ ID NO: 1863
  source 1..91: mol_type = other DNA

SEQ ID NO: 2319 - DNA, 91 bp, synthetic construct; identical to SEQ ID NO: 1863
  source 1..91: mol_type = other DNA

SEQ ID NO: 2320 - DNA, 73 bp, synthetic construct; identical to SEQ ID NO: 2015
  source 1..73: mol_type = other DNA

SEQ ID NO: 2321 - DNA, 76 bp, synthetic construct; identical to SEQ ID NO: 1952
  source 1..76: mol_type = other DNA

SEQ ID NO: 2322 - DNA, 76 bp, synthetic construct; identical to SEQ ID NO: 1952
  source 1..76: mol_type = other DNA

SEQ ID NO: 2323 - DNA, 49 bp, synthetic construct; identical to SEQ ID NO: 1982
  source 1..49: mol_type = other DNA

SEQ ID NO: 2324 - DNA, 28 bp, synthetic construct
  source 1..28: mol_type = other DNA
atggttcaggtagcccttgacagcttgt

SEQ ID NO: 2325 - DNA, 76 bp, synthetic construct; identical to SEQ ID NO: 1952
  source 1..76: mol_type = other DNA

SEQ ID NO: 2326 - DNA, 73 bp, synthetic construct; identical to SEQ ID NO: 1836
  source 1..73: mol_type = other DNA

SEQ ID NO: 2327 - DNA, 73 bp, synthetic construct; identical to SEQ ID NO: 1836
  source 1..73: mol_type = other DNA

SEQ ID NO: 2328 - DNA, 76 bp, synthetic construct; identical to SEQ ID NO: 1952
  source 1..76: mol_type = other DNA

SEQ ID NO: 2329 - DNA, 73 bp, synthetic construct; identical to SEQ ID NO: 1836
  source 1..73: mol_type = other DNA

SEQ ID NO: 2330 - DNA, 73 bp, synthetic construct; identical to SEQ ID NO: 1836
  source 1..73: mol_type = other DNA

SEQ ID NO: 2331 - DNA, 73 bp, synthetic construct; identical to SEQ ID NO: 1836
  source 1..73: mol_type = other DNA

SEQ ID NO: 2332 - DNA, 73 bp, synthetic construct; identical to SEQ ID NO: 1834
  source 1..73: mol_type = other DNA

SEQ ID NO: 2333 - DNA, 76 bp, synthetic construct; identical to SEQ ID NO: 1844
  source 1..76: mol_type = other DNA

SEQ ID NO: 2334 - DNA, 73 bp, synthetic construct; identical to SEQ ID NO: 1836
  source 1..73: mol_type = other DNA

SEQ ID NO: 2335 - DNA, 73 bp, synthetic construct; identical to SEQ ID NO: 1836
  source 1..73: mol_type = other DNA

SEQ ID NO: 2336 - DNA, 73 bp, synthetic construct; identical to SEQ ID NO: 1834
  source 1..73: mol_type = other DNA

SEQ ID NO: 2337 - DNA, 73 bp, synthetic construct; identical to SEQ ID NO: 1834
  source 1..73: mol_type = other DNA

SEQ ID NO: 2338 - DNA, 76 bp, synthetic construct; identical to SEQ ID NO: 1952
  source 1..76: mol_type = other DNA

SEQ ID NO: 2339 - DNA, 73 bp, synthetic construct; identical to SEQ ID NO: 1834
  source 1..73: mol_type = other DNA

SEQ ID NO: 2340 - DNA, 73 bp, synthetic construct; identical to SEQ ID NO: 1834
  source 1..73: mol_type = other DNA

SEQ ID NO: 2341 - DNA, 73 bp, synthetic construct; identical to SEQ ID NO: 1834
  source 1..73: mol_type = other DNA

SEQ ID NO: 2342 - DNA, 73 bp, synthetic construct; identical to SEQ ID NO: 1836
  source 1..73: mol_type = other DNA

SEQ ID NO: 2343 - DNA, 79 bp, synthetic construct; identical to SEQ ID NO: 1812
  source 1..79: mol_type = other DNA

SEQ ID NO: 2344 - DNA, 79 bp, synthetic construct; identical to SEQ ID NO: 1812
  source 1..79: mol_type = other DNA

SEQ ID NO: 2345 - DNA, 70 bp, synthetic construct; identical to SEQ ID NO: 1838
  source 1..70: mol_type = other DNA

SEQ ID NO: 2346 - DNA, 70 bp, synthetic construct; identical to SEQ ID NO: 1838
  source 1..70: mol_type = other DNA

SEQ ID NO: 2347 - DNA, 73 bp, synthetic construct; identical to SEQ ID NO: 1834
  source 1..73: mol_type = other DNA

SEQ ID NO: 2348 - DNA, 79 bp, synthetic construct; identical to SEQ ID NO: 1812
  source 1..79: mol_type = other DNA

SEQ ID NO: 2349 - DNA, 79 bp, synthetic construct; identical to SEQ ID NO: 1812
  source 1..79: mol_type = other DNA

SEQ ID NO: 2350 - DNA, 76 bp, synthetic construct; identical to SEQ ID NO: 1952
  source 1..76: mol_type = other DNA

SEQ ID NO: 2351 - DNA, 76 bp, synthetic construct; identical to SEQ ID NO: 1952
  source 1..76: mol_type = other DNA

SEQ ID NO: 2352 - DNA, 79 bp, synthetic construct; identical to SEQ ID NO: 1812
  source 1..79: mol_type = other DNA

SEQ ID NO: 2353 - DNA, 76 bp, synthetic construct; identical to SEQ ID NO: 2029
  source 1..76: mol_type = other DNA

SEQ ID NO: 2354 - DNA, 91 bp, synthetic construct; identical to SEQ ID NO: 1926
  source 1..91: mol_type = other DNA

SEQ ID NO: 2355 - DNA, 91 bp, synthetic construct; identical to SEQ ID NO: 2031
  source 1..91: mol_type = other DNA

SEQ ID NO: 2356 - DNA, 70 bp, synthetic construct; identical to SEQ ID NO: 1881
  source 1..70: mol_type = other DNA

SEQ ID NO: 2357 - DNA, 70 bp, synthetic construct; identical to SEQ ID NO: 1881
  source 1..70: mol_type = other DNA

SEQ ID NO: 2358 - DNA, 91 bp, synthetic construct; identical to SEQ ID NO: 1926
  source 1..91: mol_type = other DNA

SEQ ID NO: 2359 - DNA, 91 bp, synthetic construct; identical to SEQ ID NO: 1926
  source 1..91: mol_type = other DNA

SEQ ID NO: 2360 - DNA, 88 bp, synthetic construct; identical to SEQ ID NO: 1891
  source 1..88: mol_type = other DNA

SEQ ID NO: 2361 - DNA, 91 bp, synthetic construct; identical to SEQ ID NO: 1926
  source 1..91: mol_type = other DNA

SEQ ID NO: 2362 - DNA, 91 bp, synthetic construct; identical to SEQ ID NO: 2031
  source 1..91: mol_type = other DNA

SEQ ID NO: 2363 - DNA, 91 bp, synthetic construct; identical to SEQ ID NO: 2031
  source 1..91: mol_type = other DNA

SEQ ID NO: 2364 - DNA, 79 bp, synthetic construct; identical to SEQ ID NO: 1833
  source 1..79: mol_type = other DNA

SEQ ID NO: 2365 - DNA, 79 bp, synthetic construct; identical to SEQ ID NO: 1833
  source 1..79: mol_type = other DNA

SEQ ID NO: 2366 - DNA, 88 bp, synthetic construct; identical to SEQ ID NO: 1891
  source 1..88: mol_type = other DNA

SEQ ID NO: 2367 - DNA, 88 bp, synthetic construct; identical to SEQ ID NO: 1891
  source 1..88: mol_type = other DNA

SEQ ID NO: 2368 - DNA, 76 bp, synthetic construct; identical to SEQ ID NO: 1840
  source 1..76: mol_type = other DNA

SEQ ID NO: 2369 - DNA, 70 bp, synthetic construct; identical to SEQ ID NO: 1881
  source 1..70: mol_type = other DNA

SEQ ID NO: 2370 - DNA, 79 bp, synthetic construct; identical to SEQ ID NO: 1877
  source 1..79: mol_type = other DNA

SEQ ID NO: 2371 - DNA, 73 bp, synthetic construct; identical to SEQ ID NO: 2036
  source 1..73: mol_type = other DNA

SEQ ID NO: 2372 - DNA, 88 bp, synthetic construct; identical to SEQ ID NO: 1890
  source 1..88: mol_type = other DNA

SEQ ID NO: 2373 - DNA, 88 bp, synthetic construct; identical to SEQ ID NO: 1890
  source 1..88: mol_type = other DNA

SEQ ID NO: 2374 - DNA, 70 bp, synthetic construct; identical to SEQ ID NO: 2038
  source 1..70: mol_type = other DNA

SEQ ID NO: 2375 - DNA, 88 bp, synthetic construct; identical to SEQ ID NO: 1914
  source 1..88: mol_type = other DNA

SEQ ID NO: 2376 - DNA, 70 bp, synthetic construct; identical to SEQ ID NO: 2041
  source 1..70: mol_type = other DNA

SEQ ID NO: 2377 - DNA, 91 bp, synthetic construct; identical to SEQ ID NO: 1926
  source 1..91: mol_type = other DNA

SEQ ID NO: 2378 - DNA, 91 bp, synthetic construct; identical to SEQ ID NO: 1926
  source 1..91: mol_type = other DNA

SEQ ID NO: 2379 - DNA, 91 bp, synthetic construct; identical to SEQ ID NO: 1926
  source 1..91: mol_type = other DNA

SEQ ID NO: 2380 - DNA, 73 bp, synthetic construct; identical to SEQ ID NO: 2043
  source 1..73: mol_type = other DNA

SEQ ID NO: 2381 - DNA, 73 bp, synthetic construct; identical to SEQ ID NO: 2044
  source 1..73: mol_type = other DNA

SEQ ID NO: 2382 - DNA, 70 bp, synthetic construct; identical to SEQ ID NO: 1881
  source 1..70: mol_type = other DNA

SEQ ID NO: 2383 - DNA, 70 bp, synthetic construct; identical to SEQ ID NO: 1881
  source 1..70: mol_type = other DNA

SEQ ID NO: 2384 - DNA, 73 bp, synthetic construct; identical to SEQ ID NO: 2045
  source 1..73: mol_type = other DNA

SEQ ID NO: 2385 - DNA, 70 bp, synthetic construct; identical to SEQ ID NO: 1882
  source 1..70: mol_type = other DNA

SEQ ID NO: 2386 - DNA, 79 bp, synthetic construct; identical to SEQ ID NO: 2048
  source 1..79: mol_type = other DNA

SEQ ID NO: 2387 - DNA, 79 bp, synthetic construct; identical to SEQ ID NO: 2049
  source 1..79: mol_type = other DNA

SEQ ID NO: 2388 - DNA, 79 bp, synthetic construct; identical to SEQ ID NO: 2048
  source 1..79: mol_type = other DNA

SEQ ID NO: 2389 - DNA, 79 bp, synthetic construct; identical to SEQ ID NO: 2052
  source 1..79: mol_type = other DNA

SEQ ID NO: 2390 - DNA, 88 bp, synthetic construct; identical to SEQ ID NO: 2054
  source 1..88: mol_type = other DNA

SEQ ID NO: 2391 - DNA, 76 bp, synthetic construct; identical to SEQ ID NO: 2055
  source 1..76: mol_type = other DNA

SEQ ID NO: 2392 - DNA, 88 bp, synthetic construct; identical to SEQ ID NO: 1953
  source 1..88: mol_type = other DNA

SEQ ID NO: 2393 - DNA, 88 bp, synthetic construct; identical to SEQ ID NO: 1953
  source 1..88: mol_type = other DNA

SEQ ID NO: 2394 - DNA, 88 bp, synthetic construct; identical to SEQ ID NO: 1953
  source 1..88: mol_type = other DNA

SEQ ID NO: 2395 - DNA, 88 bp, synthetic construct; identical to SEQ ID NO: 1890
  source 1..88: mol_type = other DNA

SEQ ID NO: 2396 - DNA, 88 bp, synthetic construct; identical to SEQ ID NO: 1890
  source 1..88: mol_type = other DNA

SEQ ID NO: 2397 - DNA, 88 bp, synthetic construct; identical to SEQ ID NO: 1891
  source 1..88: mol_type = other DNA

SEQ ID NO: 2398 - DNA, 88 bp, synthetic construct; identical to SEQ ID NO: 1914
  source 1..88: mol_type = other DNA

SEQ ID NO: 2399 - DNA, 88 bp, synthetic construct; identical to SEQ ID NO: 1914
  source 1..88: mol_type = other DNA

SEQ ID NO: 2400 - DNA, 88 bp, synthetic construct; identical to SEQ ID NO: 1914
  source 1..88: mol_type = other DNA

SEQ ID NO: 2401 - DNA, 88 bp, synthetic construct; identical to SEQ ID NO: 1914
  source 1..88: mol_type = other DNA

SEQ ID NO: 2402 - DNA, 79 bp, synthetic construct; identical to SEQ ID NO: 2066
  source 1..79: mol_type = other DNA

SEQ ID NO: 2403 - DNA, 88 bp, synthetic construct; identical to SEQ ID NO: 1959
  source 1..88: mol_type = other DNA

SEQ ID NO: 2404 - DNA, 91 bp, synthetic construct; identical to SEQ ID NO: 1903
  source 1..91: mol_type = other DNA

SEQ ID NO: 2405 - DNA, 91 bp, synthetic construct; identical to SEQ ID NO: 1903
  source 1..91: mol_type = other DNA

SEQ ID NO: 2406 - DNA, 76 bp, synthetic construct; identical to SEQ ID NO: 2070
  source 1..76: mol_type = other DNA

SEQ ID NO: 2407 - DNA, 70 bp, synthetic construct; identical to SEQ ID NO: 2041
  source 1..70: mol_type = other DNA

SEQ ID NO: 2408 - DNA, 76 bp, synthetic construct; identical to SEQ ID NO: 1952
  source 1..76: mol_type = other DNA

SEQ ID NO: 2409 - DNA, 76 bp, synthetic construct; identical to SEQ ID NO: 1952
  source 1..76: mol_type = other DNA

SEQ ID NO: 2410 - DNA, 76 bp, synthetic construct; identical to SEQ ID NO: 1832
  source 1..76: mol_type = other DNA

SEQ ID NO: 2411 - DNA, 73 bp, synthetic construct; identical to SEQ ID NO: 1836
  source 1..73: mol_type = other DNA

SEQ ID NO: 2412 - DNA, 73 bp, synthetic construct; identical to SEQ ID NO: 1836
  source 1..73: mol_type = other DNA

SEQ ID NO: 2413 - DNA, 28 bp, synthetic construct
  source 1..28: mol_type = other DNA
atgttattgagtaggtttgacagcctgt

SEQ ID NO: 2414 - DNA, 76 bp, synthetic construct; identical to SEQ ID NO: 1952
  source 1..76: mol_type = other DNA

SEQ ID NO: 2415 - DNA, 76 bp, synthetic construct; identical to SEQ ID NO: 2079
  source 1..76: mol_type = other DNA

SEQ ID NO: 2416 - DNA, 76 bp, synthetic construct; identical to SEQ ID NO: 1844
  source 1..76: mol_type = other DNA

SEQ ID NO: 2417 - DNA, 79 bp, synthetic construct; identical to SEQ ID NO: 2012
  source 1..79: mol_type = other DNA

SEQ ID NO: 2418 - DNA, 76 bp, synthetic construct; identical to SEQ ID NO: 1847
  source 1..76: mol_type = other DNA

SEQ ID NO: 2419 - DNA, 76 bp, synthetic construct; identical to SEQ ID NO: 1847
  source 1..76: mol_type = other DNA

SEQ ID NO: 2420 - DNA, 91 bp, synthetic construct; identical to SEQ ID NO: 1926
  source 1..91: mol_type = other DNA

SEQ ID NO: 2421 - DNA, 91 bp, synthetic construct; identical to SEQ ID NO: 1926
  source 1..91: mol_type = other DNA

SEQ ID NO: 2422 - DNA, 91 bp, synthetic construct; identical to SEQ ID NO: 1926
  source 1..91: mol_type = other DNA

SEQ ID NO: 2423 - DNA, 73 bp, synthetic construct; identical to SEQ ID NO: 1834
  source 1..73: mol_type = other DNA

SEQ ID NO: 2424 - DNA, 70 bp, synthetic construct; identical to SEQ ID NO: 2081
  source 1..70: mol_type = other DNA

SEQ ID NO: 2425 - DNA, 73 bp, synthetic construct; identical to SEQ ID NO: 2026
  source 1..73: mol_type = other DNA

SEQ ID NO: 2426 - DNA, 76 bp, synthetic construct; identical to SEQ ID NO: 1952
  source 1..76: mol_type = other DNA

SEQ ID NO: 2427 - DNA, 76 bp, synthetic construct; identical to SEQ ID NO: 1952
  source 1..76: mol_type = other DNA

SEQ ID NO: 2428 - DNA, 76 bp, synthetic construct; identical to SEQ ID NO: 1952
  source 1..76: mol_type = other DNA

SEQ ID NO: 2429 - DNA, 76 bp, synthetic construct; identical to SEQ ID NO: 1952
  source 1..76: mol_type = other DNA

SEQ ID NO: 2430 - DNA, 76 bp, synthetic construct; identical to SEQ ID NO: 1952
  source 1..76: mol_type = other DNA

SEQ ID NO: 2431 - DNA, 76 bp, synthetic construct; identical to SEQ ID NO: 1952
  source 1..76: mol_type = other DNA

SEQ ID NO: 2432 - DNA, 79 bp, synthetic construct; identical to SEQ ID NO: 2087
  source 1..79: mol_type = other DNA

SEQ ID NO: 2433 - DNA, 76 bp, synthetic construct; identical to SEQ ID NO: 1952
  source 1..76: mol_type = other DNA

SEQ ID NO: 2434 - DNA, 82 bp, synthetic construct; identical to SEQ ID NO: 2089
  source 1..82: mol_type = other DNA

SEQ ID NO: 2435 - DNA, 70 bp, synthetic construct; identical to SEQ ID NO: 2090
  source 1..70: mol_type = other DNA

SEQ ID NO: 2436 - DNA, 76 bp, synthetic construct; identical to SEQ ID NO: 2070
  source 1..76: mol_type = other DNA

SEQ ID NO: 2437 - DNA, 70 bp, synthetic construct; identical to SEQ ID NO: 2093
  source 1..70: mol_type = other DNA

SEQ ID NO: 2438 - DNA, 76 bp, synthetic construct; identical to SEQ ID NO: 2070
  source 1..76: mol_type = other DNA

SEQ ID NO: 2439 - DNA, 79 bp, synthetic construct; identical to SEQ ID NO: 1812
  source 1..79: mol_type = other DNA

SEQ ID NO: 2440 - DNA, 49 bp, synthetic construct; identical to SEQ ID NO: 2096
  source 1..49: mol_type = other DNA

SEQ ID NO: 2441 - DNA, 88 bp, synthetic construct; identical to SEQ ID NO: 1914
  source 1..88: mol_type = other DNA

SEQ ID NO: 2442 - DNA, 88 bp, synthetic construct; identical to SEQ ID NO: 1914
  source 1..88: mol_type = other DNA

SEQ ID NO: 2443 - DNA, 76 bp, synthetic construct; identical to SEQ ID NO: 1952
  source 1..76: mol_type = other DNA

SEQ ID NO: 2444 - DNA, 76 bp, synthetic construct; identical to SEQ ID NO: 1952
  source 1..76: mol_type = other DNA

SEQ ID NO: 2445 - DNA, 88 bp, synthetic construct; identical to SEQ ID NO: 1914
  source 1..88: mol_type = other DNA

SEQ ID NO: 2446 - DNA, 79 bp, synthetic construct; identical to SEQ ID NO: 2097
  source 1..79: mol_type = other DNA

SEQ ID NO: 2447 - DNA, 76 bp, synthetic construct; identical to SEQ ID NO: 1832
  source 1..76: mol_type = other DNA

SEQ ID NO: 2448 - DNA, 76 bp, synthetic construct; identical to SEQ ID NO: 1832
  source 1..76: mol_type = other DNA

SEQ ID NO: 2449 - DNA, 76 bp, synthetic construct; identical to SEQ ID NO: 1952
  source 1..76: mol_type = other DNA

SEQ ID NO: 2450 - DNA, 76 bp, synthetic construct; identical to SEQ ID NO: 1844
  source 1..76: mol_type = other DNA

SEQ ID NO: 2451 - DNA, 76 bp, synthetic construct; identical to SEQ ID NO: 1844
  source 1..76: mol_type = other DNA

SEQ ID NO: 2452 - DNA, 64 bp, synthetic construct; identical to SEQ ID NO: 2102
  source 1..64: mol_type = other DNA

SEQ ID NO: 2453 - DNA, 79 bp, synthetic construct; identical to SEQ ID NO: 2052
  source 1..79: mol_type = other DNA

SEQ ID NO: 2454 - DNA, 76 bp, synthetic construct; identical to SEQ ID NO: 1853
  source 1..76: mol_type = other DNA

SEQ ID NO: 2455 - DNA, 76 bp, synthetic construct; identical to SEQ ID NO: 2109
  source 1..76: mol_type = other DNA

SEQ ID NO: 2456 - DNA, 76 bp, synthetic construct; identical to SEQ ID NO: 1841
  source 1..76: mol_type = other DNA

SEQ ID NO: 2457 - DNA, 76 bp, synthetic construct; identical to SEQ ID NO: 1841
  source 1..76: mol_type = other DNA

SEQ ID NO: 2458 - DNA, 73 bp, synthetic construct; identical to SEQ ID NO: 1834
  source 1..73: mol_type = other DNA

SEQ ID NO: 2459 - DNA, 76 bp, synthetic construct; identical to SEQ ID NO: 2088
  source 1..76: mol_type = other DNA

SEQ ID NO: 2460 - DNA, 88 bp, synthetic construct; identical to SEQ ID NO: 1914
  source 1..88: mol_type = other DNA

SEQ ID NO: 2461 - DNA, 88 bp, synthetic construct; identical to SEQ ID NO: 1914
  source 1..88: mol_type = other DNA

SEQ ID NO: 2462 - DNA, 85 bp, synthetic construct; identical to SEQ ID NO: 2117
  source 1..85: mol_type = other DNA

SEQ ID NO: 2463 - DNA, 85 bp, synthetic construct; identical to SEQ ID NO: 2117
  source 1..85: mol_type = other DNA

SEQ ID NO: 2464 - DNA, 88 bp, synthetic construct; identical to SEQ ID NO: 2121
  source 1..88: mol_type = other DNA

SEQ ID NO: 2465 - DNA, 88 bp, synthetic construct; identical to SEQ ID NO: 2122
  source 1..88: mol_type = other DNA

SEQ ID NO: 2466 - DNA, 88 bp, synthetic construct; identical to SEQ ID NO: 1891
  source 1..88: mol_type = other DNA

SEQ ID NO: 2467 - DNA, 88 bp, synthetic construct; identical to SEQ ID NO: 2125
  source 1..88: mol_type = other DNA

SEQ ID NO: 2468 - DNA, 76 bp, synthetic construct; identical to SEQ ID NO: 2088
  source 1..76: mol_type = other DNA

SEQ ID NO: 2469 - DNA, 76 bp, synthetic construct; identical to SEQ ID NO: 2088
  source 1..76: mol_type = other DNA

SEQ ID NO: 2470 - DNA, 91 bp, synthetic construct
  source 1..91: mol_type = other DNA
atgacaataatctatgccatgcgtttcctgttgataatactgtcatggtctatggcaactttcgaagcctataatgaccttgacagtctgc

SEQ ID NO: 2471 - DNA, 91 bp, synthetic construct; identical to SEQ ID NO: 2470
  source 1..91: mol_type = other DNA

SEQ ID NO: 2472 - DNA, 91 bp, synthetic construct; identical to SEQ ID NO: 2470
  source 1..91: mol_type = other DNA

SEQ ID NO: 2473 - DNA, 91 bp, synthetic construct
  source 1..91: mol_type = other DNA
atgacaatagtctatgccatgcgtttcctgttggtaatactgtcatggtctatggcaactttcgaagcctataatgaccttgacagtctgc

SEQ ID NO: 2474 - DNA, 76 bp, synthetic construct; identical to SEQ ID NO: 1840
  source 1..76: mol_type = other DNA

SEQ ID NO: 2475 - DNA, 88 bp, synthetic construct; identical to SEQ ID NO: 1914
  source 1..88: mol_type = other DNA

SEQ ID NO: 2476 - DNA, 88 bp, synthetic construct; identical to SEQ ID NO: 1891
  source 1..88: mol_type = other DNA

SEQ ID NO: 2477 - DNA, 76 bp, synthetic construct; identical to SEQ ID NO: 1845
  source 1..76: mol_type = other DNA

SEQ ID NO: 2478 - DNA, 88 bp, synthetic construct; identical to SEQ ID NO: 1891
  source 1..88: mol_type = other DNA

SEQ ID NO: 2479 - DNA, 103 bp, synthetic construct; identical to SEQ ID NO: 1938
  source 1..103: mol_type = other DNA

SEQ ID NO: 2480 - DNA, 103 bp, synthetic construct; identical to SEQ ID NO: 1938
  source 1..103: mol_type = other DNA

SEQ ID NO: 2481 - DNA, 103 bp, synthetic construct; identical to SEQ ID NO: 1939
  source 1..103: mol_type = other DNA

SEQ ID NO: 2482 - DNA, 103 bp, synthetic construct; identical to SEQ ID NO: 1939
  source 1..103: mol_type = other DNA

SEQ ID NO: 2483 - DNA, 70 bp, synthetic construct; identical to SEQ ID NO: 2153
  source 1..70: mol_type = other DNA

SEQ ID NO: 2484 - DNA, 76 bp, synthetic construct; identical to SEQ ID NO: 2158
  source 1..76: mol_type = other DNA

SEQ ID NO: 2485 - DNA, 76 bp, synthetic construct; identical to SEQ ID NO: 2164
  source 1..76: mol_type = other DNA

SEQ ID NO: 2486 - DNA, 76 bp, synthetic construct; identical to SEQ ID NO: 1845
  source 1..76: mol_type = other DNA

SEQ ID NO: 2487 - DNA, 76 bp, synthetic construct; identical to SEQ ID NO: 1845
  source 1..76: mol_type = other DNA

SEQ ID NO: 2488 - DNA, 76 bp, synthetic construct; identical to SEQ ID NO: 1845
  source 1..76: mol_type = other DNA

SEQ ID NO: 2489 - DNA, 43 bp, synthetic construct; identical to SEQ ID NO: 2167
  source 1..43: mol_type = other DNA

SEQ ID NO: 2490 - DNA, 79 bp, synthetic construct; identical to SEQ ID NO: 2171
  source 1..79: mol_type = other DNA

SEQ ID NO: 2491 - DNA, 79 bp, synthetic construct; identical to SEQ ID NO: 2171
  source 1..79: mol_type = other DNA

SEQ ID NO: 2492 - DNA, 52 bp, synthetic construct; identical to SEQ ID NO: 2118
  source 1..52: mol_type = other DNA

SEQ ID NO: 2493 - DNA, 88 bp, synthetic construct; identical to SEQ ID NO: 1891
  source 1..88: mol_type = other DNA

SEQ ID NO: 2494 - DNA, 88 bp, synthetic construct; identical to SEQ ID NO: 1914
  source 1..88: mol_type = other DNA

SEQ ID NO: 2495 - DNA, 88 bp, synthetic construct; identical to SEQ ID NO: 1914
  source 1..88: mol_type = other DNA

SEQ ID NO: 2496 - DNA, 88 bp, synthetic construct; identical to SEQ ID NO: 1914
  source 1..88: mol_type = other DNA

SEQ ID NO: 2497 - DNA, 88 bp, synthetic construct
  source 1..88: mol_type = other DNA
atgacaaattatgccattcgtttcctgttgatagtcgtgtcattgctttacgcgggtctagaggcctgcgtagaacttgacagtttac

SEQ ID NO: 2498 - DNA, 88 bp, synthetic construct; identical to SEQ ID NO: 1890
  source 1..88: mol_type = other DNA

SEQ ID NO: 2499 - DNA, 52 bp, synthetic construct; identical to SEQ ID NO: 1797
  source 1..52: mol_type = other DNA

SEQ ID NO: 2500 - DNA, 52 bp, synthetic construct; identical to SEQ ID NO: 1799
  source 1..52: mol_type = other DNA

SEQ ID NO: 2501 - DNA, 40 bp, synthetic construct; identical to SEQ ID NO: 1803
  source 1..40: mol_type = other DNA

SEQ ID NO: 2502 - DNA, 73 bp, synthetic construct; identical to SEQ ID NO: 1814
  source 1..73: mol_type = other DNA

SEQ ID NO: 2503 - DNA, 109 bp, synthetic construct; identical to SEQ ID NO: 1816
  source 1..109: mol_type = other DNA

SEQ ID NO: 2504 - DNA, 94 bp, synthetic construct; identical to SEQ ID NO: 1813
  source 1..94: mol_type = other DNA

SEQ ID NO: 2505 - DNA, 107 bp, synthetic construct; identical to SEQ ID NO: 1818
  source 1..107: mol_type = other DNA

SEQ ID NO: 2506 - DNA, 86 bp, synthetic construct; identical to SEQ ID NO: 1804
  source 1..86: mol_type = other DNA

SEQ ID NO: 2507 - DNA, 61 bp, synthetic construct; identical to SEQ ID NO: 1854
  source 1..61: mol_type = other DNA

SEQ ID NO: 2508 - DNA, 97 bp, synthetic construct; identical to SEQ ID NO: 1860
  source 1..97: mol_type = other DNA

SEQ ID NO: 2509 - DNA, 64 bp, synthetic construct; identical to SEQ ID NO: 1865
  source 1..64: mol_type = other DNA

SEQ ID NO: 2510 - DNA, 49 bp, synthetic construct; identical to SEQ ID NO: 1862
  source 1..49: mol_type = other DNA

SEQ ID NO: 2511 - DNA, 86 bp, synthetic construct; identical to SEQ ID NO: 1880
  source 1..86: mol_type = other DNA

SEQ ID NO: 2512 - DNA, 86 bp, synthetic construct; identical to SEQ ID NO: 1880
  source 1..86: mol_type = other DNA

SEQ ID NO: 2513 - DNA, 105 bp, synthetic construct; identical to SEQ ID NO: 1889
  source 1..105: mol_type = other DNA

SEQ ID NO: 2514 - DNA, 109 bp, synthetic construct; identical to SEQ ID NO: 1896
  source 1..109: mol_type = other DNA

SEQ ID NO: 2515 - DNA, 49 bp, synthetic construct; identical to SEQ ID NO: 1897
  source 1..49: mol_type = other DNA

SEQ ID NO: 2516 - DNA, 109 bp, synthetic construct; identical to SEQ ID NO: 1909
  source 1..109: mol_type = other DNA

SEQ ID NO: 2517 - DNA, 109 bp, synthetic construct; identical to SEQ ID NO: 1911
  source 1..109: mol_type = other DNA

SEQ ID NO: 2518 - DNA, 49 bp, synthetic construct; identical to SEQ ID NO: 1871
  source 1..49: mol_type = other DNA

SEQ ID NO: 2519 - DNA, 49 bp, synthetic construct; identical to SEQ ID NO: 1871
  source 1..49: mol_type = other DNA

SEQ ID NO: 2520 - DNA, 82 bp, synthetic construct; identical to SEQ ID NO: 1930
  source 1..82: mol_type = other DNA

SEQ ID NO: 2521 - DNA, 61 bp, synthetic construct; identical to SEQ ID NO: 1873
  source 1..61: mol_type = other DNA

SEQ ID NO: 2522 - DNA, 43 bp, synthetic construct; identical to SEQ ID NO: 1933
  source 1..43: mol_type = other DNA

SEQ ID NO: 2523 - DNA, 43 bp, synthetic construct; identical to SEQ ID NO: 1934
  source 1..43: mol_type = other DNA

SEQ ID NO: 2524 - DNA, 110 bp, synthetic construct; identical to SEQ ID NO: 1937
  source 1..110: mol_type = other DNA

SEQ ID NO: 2525 - DNA, 58 bp, synthetic construct; identical to SEQ ID NO: 1944
  source 1..58: mol_type = other DNA

SEQ ID NO: 2526 - DNA, 73 bp, synthetic construct; identical to SEQ ID NO: 1954
  source 1..73: mol_type = other DNA

SEQ ID NO: 2527 - DNA, 88 bp, synthetic construct; identical to SEQ ID NO: 1963
  source 1..88: mol_type = other DNA

SEQ ID NO: 2528 - DNA, 86 bp, synthetic construct; identical to SEQ ID NO: 1951
  source 1..86: mol_type = other DNA

SEQ ID NO: 2529 - DNA, 110 bp, synthetic construct; identical to SEQ ID NO: 1968
  source 1..110: mol_type = other DNA

SEQ ID NO: 2530 - DNA, 95 bp, synthetic construct; identical to SEQ ID NO: 1974
  source 1..95: mol_type = other DNA

SEQ ID NO: 2531 - DNA, 46 bp, synthetic construct; identical to SEQ ID NO: 1975
  source 1..46: mol_type = other DNA

SEQ ID NO: 2532 - DNA, 110 bp, synthetic construct; identical to SEQ ID NO: 1977
  source 1..110: mol_type = other DNA

SEQ ID NO: 2533 - DNA, 85 bp, synthetic construct; identical to SEQ ID NO: 1979
  source 1..85: mol_type = other DNA

SEQ ID NO: 2534 - DNA, 85 bp, synthetic construct; identical to SEQ ID NO: 1979
  source 1..85: mol_type = other DNA

SEQ ID NO: 2535 - DNA, 52 bp, synthetic construct; identical to SEQ ID NO: 1981
  source 1..52: mol_type = other DNA

SEQ ID NO: 2536 - DNA, 72 bp, synthetic construct; identical to SEQ ID NO: 1988
  source 1..72: mol_type = other DNA

SEQ ID NO: 2537 - DNA, 86 bp, synthetic construct; identical to SEQ ID NO: 1997
  source 1..86: mol_type = other DNA

SEQ ID NO: 2538 - DNA, 43 bp, synthetic construct; identical to SEQ ID NO: 1998
  source 1..43: mol_type = other DNA

SEQ ID NO: 2539 - DNA, 49 bp, synthetic construct; identical to SEQ ID NO: 1987
  source 1..49: mol_type = other DNA

SEQ ID NO: 2540 - DNA, 86 bp, synthetic construct; identical to SEQ ID NO: 1828
  source 1..86: mol_type = other DNA

SEQ ID NO: 2541 - DNA, 40 bp, synthetic construct; identical to SEQ ID NO: 2019
  source 1..40: mol_type = other DNA

SEQ ID NO: 2542 - DNA, 86 bp, synthetic construct; identical to SEQ ID NO: 1951
  source 1..86: mol_type = other DNA

SEQ ID NO: 2543 - DNA, 108 bp, synthetic construct; identical to SEQ ID NO: 2030
  source 1..108: mol_type = other DNA

SEQ ID NO: 2544 - DNA, 108 bp, synthetic construct; identical to SEQ ID NO: 2030
  source 1..108: mol_type = other DNA

SEQ ID NO: 2545 - DNA, 108 bp, synthetic construct; identical to SEQ ID NO: 2030
  source 1..108: mol_type = other DNA

SEQ ID NO: 2546 - DNA, 88 bp, synthetic construct; identical to SEQ ID NO: 2035
  source 1..88: mol_type = other DNA

SEQ ID NO: 2547 - DNA, 108 bp, synthetic construct; identical to SEQ ID NO: 2040
  source 1..108: mol_type = other DNA

SEQ ID NO: 2548 - DNA, 49 bp, synthetic construct; identical to SEQ ID NO: 2042
  source 1..49: mol_type = other DNA

SEQ ID NO: 2549 - DNA, 108 bp, synthetic construct; identical to SEQ ID NO: 2047
  source 1..108: mol_type = other DNA

SEQ ID NO: 2550 - DNA, 49 bp, synthetic construct; identical to SEQ ID NO: 2050
  source 1..49: mol_type = other DNA

SEQ ID NO: 2551 - DNA, 103 bp, synthetic construct; identical to SEQ ID NO: 2053
  source 1..103: mol_type = other DNA

SEQ ID NO: 2552 - DNA, 86 bp, synthetic construct; identical to SEQ ID NO: 1828
  source 1..86: mol_type = other DNA

SEQ ID NO: 2553 - DNA, 61 bp, synthetic construct; identical to SEQ ID NO: 2068
  source 1..61: mol_type = other DNA

SEQ ID NO: 2554 - DNA, 86 bp, synthetic construct; identical to SEQ ID NO: 1951
  source 1..86: mol_type = other DNA

SEQ ID NO: 2555 - DNA, 86 bp, synthetic construct; identical to SEQ ID NO: 1951
  source 1..86: mol_type = other DNA

SEQ ID NO: 2556 - DNA, 86 bp, synthetic construct; identical to SEQ ID NO: 1967
  source 1..86: mol_type = other DNA

SEQ ID NO: 2557 - DNA, 103 bp, synthetic construct; identical to SEQ ID NO: 2069
  source 1..103: mol_type = other DNA

SEQ ID NO: 2558 - DNA, 33 bp, synthetic construct; identical to SEQ ID NO: 2071
  source 1..33: mol_type = other DNA

SEQ ID NO: 2559 - DNA, 112 bp, synthetic construct; identical to SEQ ID NO: 1817
  source 1..112: mol_type = other DNA

SEQ ID NO: 2560 - DNA, 52 bp, synthetic construct; identical to SEQ ID NO: 2084
  source 1..52: mol_type = other DNA

SEQ ID NO: 2561 - DNA, 105 bp, synthetic construct; identical to SEQ ID NO: 2091
  source 1..105: mol_type = other DNA

SEQ ID NO: 2562 - DNA, 40 bp, synthetic construct; identical to SEQ ID NO: 2094
  source 1..40: mol_type = other DNA

SEQ ID NO: 2563 - DNA, 43 bp, synthetic construct; identical to SEQ ID NO: 1934
  source 1..43: mol_type = other DNA

SEQ ID NO: 2564 - DNA, 43 bp, synthetic construct; identical to SEQ ID NO: 1934
  source 1..43: mol_type = other DNA

SEQ ID NO: 2565 - DNA, 64 bp, synthetic construct; identical to SEQ ID NO: 2095
  source 1..64: mol_type = other DNA

SEQ ID NO: 2566 - DNA, 43 bp, synthetic construct; identical to SEQ ID NO: 1934
  source 1..43: mol_type = other DNA

SEQ ID NO: 2567 - DNA, 43 bp, synthetic construct; identical to SEQ ID NO: 1935
  source 1..43: mol_type = other DNA

SEQ ID NO: 2568 - DNA, 43 bp, synthetic construct; identical to SEQ ID NO: 1935
  source 1..43: mol_type = other DNA

SEQ ID NO: 2569 - DNA, 52 bp, synthetic construct; identical to SEQ ID NO: 2124
  source 1..52: mol_type = other DNA

SEQ ID NO: 2570 - DNA, 103 bp, synthetic construct; identical to SEQ ID NO: 1936
  source 1..103: mol_type = other DNA

SEQ ID NO: 2571 - DNA, 86 bp, synthetic construct; identical to SEQ ID NO: 2131
  source 1..86: mol_type = other DNA

SEQ ID NO: 2572 - DNA, 86 bp, synthetic construct; identical to SEQ ID NO: 1880
  source 1..86: mol_type = other DNA

SEQ ID NO: 2573 - DNA, 86 bp, synthetic construct; identical to SEQ ID NO: 1880
  source 1..86: mol_type = other DNA

SEQ ID NO: 2574 - DNA, 109 bp, synthetic construct; identical to SEQ ID NO: 2138
  source 1..109: mol_type = other DNA

SEQ ID NO: 2575 - DNA, 109 bp, synthetic construct; identical to SEQ ID NO: 2140
  source 1..109: mol_type = other DNA

SEQ ID NO: 2576 - DNA, 109 bp, synthetic construct; identical to SEQ ID NO: 2141
  source 1..109: mol_type = other DNA

SEQ ID NO: 2577 - DNA, 88 bp, synthetic construct; identical to SEQ ID NO: 2154
  source 1..88: mol_type = other DNA

SEQ ID NO: 2578 - DNA, 61 bp, synthetic construct; identical to SEQ ID NO: 1894
  source 1..61: mol_type = other DNA

SEQ ID NO: 2579 - DNA, 61 bp, synthetic construct; identical to SEQ ID NO: 2123
  source 1..61: mol_type = other DNA

SEQ ID NO: 2580 - DNA, 110 bp, synthetic construct; identical to SEQ ID NO: 2156
  source 1..110: mol_type = other DNA

SEQ ID NO: 2581 - DNA, 107 bp, synthetic construct; identical to SEQ ID NO: 2157
  source 1..107: mol_type = other DNA

SEQ ID NO: 2582 - DNA, 49 bp, synthetic construct; identical to SEQ ID NO: 2159
  source 1..49: mol_type = other DNA

SEQ ID NO: 2583 - DNA, 49 bp, synthetic construct; identical to SEQ ID NO: 2162
  source 1..49: mol_type = other DNA

SEQ ID NO: 2584 - DNA, 105 bp, synthetic construct; identical to SEQ ID NO: 1889
  source 1..105: mol_type = other DNA

SEQ ID NO: 2585 - DNA, 105 bp, synthetic construct; identical to SEQ ID NO: 1889
  source 1..105: mol_type = other DNA

SEQ ID NO: 2586 - DNA, 110 bp, synthetic construct; identical to SEQ ID NO: 1968
  source 1..110: mol_type = other DNA

SEQ ID NO: 2587 - DNA, 109 bp, synthetic construct; identical to SEQ ID NO: 2170
  source 1..109: mol_type = other DNA

SEQ ID NO: 2588 - DNA, 109 bp, synthetic construct; identical to SEQ ID NO: 1911
  source 1..109: mol_type = other DNA

SEQ ID NO: 2589 - DNA, 109 bp, synthetic construct; identical to SEQ ID NO: 1911
  source 1..109: mol_type = other DNA

SEQ ID NO: 2590 - DNA, 108 bp, synthetic construct; identical to SEQ ID NO: 2040
  source 1..108: mol_type = other DNA

SEQ ID NO: 2591 - DNA, 108 bp, synthetic construct; identical to SEQ ID NO: 2030
  source 1..108: mol_type = other DNA

SEQ ID NO: 2592 - DNA, 108 bp, synthetic construct; identical to SEQ ID NO: 2030
  source 1..108: mol_type = other DNA

SEQ ID NO: 2593 - DNA, 86 bp, synthetic construct; identical to SEQ ID NO: 2175
  source 1..86: mol_type = other DNA

SEQ ID NO: 2594 - DNA, 120 bp, synthetic construct; identical to SEQ ID NO: 835
  source 1..120: mol_type = other DNA

SEQ ID NO: 2595 - DNA, 111 bp, synthetic construct
  source 1..111: mol_type = other DNA
tagaaatgatatataatgtaatctgcgatggagactatacaatggtaatcttacgcttcatgacaatgtgtttatcttggctctgcaaggataaaggtattgacaatctgt

SEQ ID NO: 2596 - DNA, 120 bp, synthetic construct
  source 1..120: mol_type = other DNA
tagaaatggattatgctataactataaccgtggaggtatctatgaagaccctgttccagttcctgctgtctatctgctcagcttgccttagtggcttgccgattggacttgacaacctgt

SEQ ID NO: 2597 - DNA, 132 bp, synthetic construct
  source 1..132: mol_type = other DNA
taggatcgacgtatagtgtcagcgtcacccttggagtacctatgaatataagtatccgagggctgctggccgcattgctggtcaccctgggctgttacacctgggatgccgccttggggcttgacagcttgt

SEQ ID NO: 2598 - DNA, 120 bp, synthetic construct; identical to SEQ ID NO: 835
  source 1..120: mol_type = other DNA

SEQ ID NO: 2599 - DNA, 120 bp, synthetic construct; identical to SEQ ID NO: 841
  source 1..120: mol_type = other DNA

SEQ ID NO: 2600 - DNA, 120 bp, synthetic construct
  source 1..120: mol_type = other DNA
tagaaatggattatgctataactataaccgtggaggtatctatgaagaccctgttccagttcctgctgtctatctgctcagcttgccttggtggcgtgccgattggacttgacaacctgt

SEQ ID NO: 2601 - DNA, 132 bp, synthetic construct; identical to SEQ ID NO: 844
  source 1..132: mol_type = other DNA

SEQ ID NO: 2602 - DNA, 138 bp, synthetic construct
  source 1..138: mol_type = other DNA
tcgacatgctgaggtatgctggccgtgccgtcctcatcggacttctggccgtcctgccggaacagtccggcgaaccaaccaaggagatgatctcgttgttcatcgacctgatctcgtcgccggcccttgacagggtca

SEQ ID NO: 2603 - DNA, 120 bp, synthetic construct
  source 1..120: mol_type = other DNA
tagaaatggattatactgtaactataaccgtggaggtatctatgaagaccctattccagttcctgctgtctatctgctcagcttgccttattggcataccgctgggagttgacaacctgt

SEQ ID NO: 2604 - DNA, 102 bp, synthetic construct
  source 1..102: mol_type = other DNA
tcaacctagtgtggtatgttggaactgctgactgcagaggagaccaagcgatgagcccagcgacctggatcccgcttgcgcgaacggcgcttgcggtcctta

SEQ ID NO: 2605 - DNA, 132 bp, synthetic construct
  source 1..132: mol_type = other DNA
taggatcgacgtatagtgtcagcgtcacacttggagtacctatgaagataagtatccgagggctgctggccgcattgctggtcaccctgggctgttacacctgggatgccgccttggggcttgacagcttgt

SEQ ID NO: 2606 - DNA, 132 bp, synthetic construct; identical to SEQ ID NO: 844
  source 1..132: mol_type = other DNA

SEQ ID NO: 2607 - DNA, 120 bp, synthetic construct
  source 1..120: mol_type = other DNA
tagaaatggattatactataactataaccgtggaagtatctatgaagaccttgttccagttcctgctgtctatctgctcagtttgctttggttgcattccgattggacttgacagcctgt

SEQ ID NO: 2608 - DNA, 126 bp, synthetic construct
  source 1..126: mol_type = other DNA
tcgacctaagcgattatactgtcacatggtattccggcgatttcatcgccagtcacctcgacccgtcccaggaaggcgcattcatcatgcacgctacgctgatccgaatcaccgttgacggtataa

SEQ ID NO: 2609 - DNA, 135 bp, synthetic construct
  source 1..135: mol_type = other DNA
tatacttagtatactgagttggttgattatgacgaatggaggtatccaaatgccaagttactcagaagcattatcgattgtactgagctcggtaaaccttgccgttacaattgagataaggcttgcaagaaatcc

SEQ ID NO: 2610 - DNA, 135 bp, synthetic construct
  source 1..135: mol_type = other DNA
tatacttagtatactgaattggttgcttatgacgaatggaggtttccaaatgccaaattacttagaagcattatcgattgtacttagctcggtaaatcttaccgttacaattgagataaggcttgcaagaagttc

SEQ ID NO: 2611 - DNA, 126 bp, synthetic construct
  source 1..126: mol_type = other DNA
acgaaatcgtctatactgtcaccatggcgctacgcgctctggcgtcccgtgacgaccggcggatactggagattactatgaacctcatcgtactaatcgccgctcatttagggcttgacagtttca

SEQ ID NO: 2612 - DNA, 120 bp, synthetic construct
  source 1..120: mol_type = other DNA
tagaaatggattatactgtaactataaccgtggaggtatctatgaagaccctattccagttcctgctgtctatctgctcagcttgccttgtgggcataccgattggacttgacagcctgt

SEQ ID NO: 2613 - DNA, 120 bp, synthetic construct
  source 1..120: mol_type = other DNA
tagaaatggattatgctgtaactataaccgtggaggtatctatgaagaccctgttccagttcctgttgtctatctgctcagtttgccttggtggcatgccgattggacttgacaacctgt

SEQ ID NO: 2614 - DNA, 120 bp, synthetic construct
  source 1..120: mol_type = other DNA
tagaaatggattatgctgtaactataaccgtggaggtatctatgaagaccctgttccagttcctgttgtatatctgctcagtttgccttggtggcatgccgattggacttgacaacctgt

SEQ ID NO: 2615 - DNA, 120 bp, synthetic construct
  source 1..120: mol_type = other DNA
tagaaatggattatgctataactataaccgtggaggtatctatgaagaccctgttccagttcctgctgtctatctgctcagcttgccttggtggcttgccgattggacttgacaacctgt

SEQ ID NO: 2616 - DNA, 120 bp, synthetic construct
  source 1..120: mol_type = other DNA
tagaaatggattatgctataactataatcgtggaggtatctatgaagaccctgttccagtttctgctgtctatctgctcagcttgccttggtggcgtgccgattggacttgacaacctgt

SEQ ID NO: 2617 - DNA, 120 bp, synthetic construct; identical to SEQ ID NO: 837
  source 1..120: mol_type = other DNA

SEQ ID NO: 2618 - DNA, 129 bp, synthetic construct
  source 1..129: mol_type = other DNA
caagatacttgtatagcctgctcacggaggaacttatggagacaatcgtggtcgaactgacccggatcatcttgatcacagtgttccgctggtcgacgtgcgctagcgcacgctgccctggcgtgataa

SEQ ID NO: 2619 - DNA, 120 bp, synthetic construct
  source 1..120: mol_type = other DNA
ttaacattctggcgtatagtcgtgacgccggtcatggagacctcatcatgcccaccgggcaatccgcgatctggtgcaagttactcctcacctcggtgaagatcgcccttgcgtccatta

SEQ ID NO: 2620 - DNA, 120 bp, synthetic construct
  source 1..120: mol_type = other DNA
tagaaatggattatactataactataaccgtggaagtatctatgaagaccttgttccagttcctactgtctatctgctcagtttgctttggttgcattccgattggacttgacagcctgt

SEQ ID NO: 2621 - DNA, 144 bp, synthetic construct
  source 1..144: mol_type = other DNA
tcgacgtggtcgtgtatactgtgacgcacctggcaatgtggtattgccggattgccgcaaagccgcccgcgtggctggcgaaaggagcccgaattatggaactcgcaatctgcaccgccccggaggttggccttgacagtttaa

SEQ ID NO: 2622 - DNA, 144 bp, synthetic construct
  source 1..144: mol_type = other DNA
acgacgatgtcgtgtatactgtgataagtttaatgtacgaatgtactttatcatactgtcgccaacataaactaacaagaacggaaatacctatgacgatactgctcattctggttgagcttgctgccagccttgacagtttaa

SEQ ID NO: 2623 - DNA, 150 bp, synthetic construct
  source 1..150: mol_type = other DNA
taaaacaatcaattataattactataaggaggcaattataaccgtgataagtttaagtagcttaccagaattacaacttgctgtactgtatctggcgttcagctggttacttgtcgaacttcttaagaataaaacgtttgacaaatgtga

SEQ ID NO: 2624 - DNA, 120 bp, synthetic construct; identical to SEQ ID NO: 842
  source 1..120: mol_type = other DNA

SEQ ID NO: 2625 - DNA, 126 bp, synthetic construct
  source 1..126: mol_type = other DNA
caatgttgtgttgtgaccaactgactgaggaactgttcgtgatcgctgccaaactgacgttgatcgccgtgtccgtcctggtcggccgggtggcatccgctagcggatgctgcccagacgtggtaa

SEQ ID NO: 2626 - DNA, 123 bp, synthetic construct
  source 1..123: mol_type = other DNA
tcgaaaccgcgttagtttaatctgtgctacctgtaaggaggacgcgatggcaggcctagttatagacgctgcgccggtagtcgcccacctggtcacggatgtgatcagggtgttgacaactcg

SEQ ID NO: 2627 - DNA, 120 bp, synthetic construct
  source 1..120: mol_type = other DNA
tagaaatggattatgctataactataaccgtggaggtatctatgaagaccctgttccagttcctgctgtctatttgctcagcttgccttggtggcgtgccgattggagttgacaacctgt

SEQ ID NO: 2628 - DNA, 132 bp, synthetic construct
  source 1..132: mol_type = other DNA
taggatcgacgtatagtgtcagcgtcacacttggagtacctatgaagataagtatccgagggctgctggccgcattgctggtcaccctgggttgttacacctgggatgccgccttggggcttgacagcttgt

SEQ ID NO: 2629 - DNA, 120 bp, synthetic construct
  source 1..120: mol_type = other DNA
tagaaatggattatgctataactataaccgtggaggtatctatgaagaccctgttccagttcctgctgtctatctgctcagcttgccttggtggcgtgccgattggagttgacaacctgt

SEQ ID NO: 2630 - DNA, 120 bp, synthetic construct; identical to SEQ ID NO: 836
  source 1..120: mol_type = other DNA

SEQ ID NO: 2631 - DNA, 135 bp, synthetic construct; identical to SEQ ID NO: 840
  source 1..135: mol_type = other DNA

SEQ ID NO: 2632 - DNA, 135 bp, synthetic construct
  source 1..135: mol_type = other DNA
tataattagtatattgaattggttgattatgacgactggaggtatccaaatgccaagttattcagaagcgttatcgattgtaattagctgggtcagccatgtgattacaattgagataaagcttgacagaaattc

SEQ ID NO: 2633 - DNA, 135 bp, synthetic construct
  source 1..135: mol_type = other DNA
tataattagtatattgaattggttgattatgacgcttggaggtatccaaatgccaagttattcagaagcgttatcgattgtaattagctgggtcagccttgtgattacaattgagataaagcttgacagaaattc

SEQ ID NO: 2634 - DNA, 120 bp, synthetic construct
  source 1..120: mol_type = other DNA
tagaaatgagttacgatataactatcaccgtggaggtatctatgaagaccctattccagttcctgtcgtggttcgtctcagttagccttattggcgtccctatagaacttgacaacctgt

SEQ ID NO: 2635 - DNA, 120 bp, synthetic construct; identical to SEQ ID NO: 2634
  source 1..120: mol_type = other DNA

SEQ ID NO: 2636 - DNA, 141 bp, synthetic construct
  source 1..141: mol_type = other DNA
aacaattattatataatcatcttataatgattagcgtaggagttgattgtagaatgcctaacgatatcgacatgcgaattgtaaacttactatttagcatagtaatcgaacaattgtgcgactatctgattgacaatatca

SEQ ID NO: 2637 - DNA, 117 bp, synthetic construct
  source 1..117: mol_type = other DNA
tagaaacactgtataatgtaatcagtatcatggagaccgttatgagcatcgtccacctgttaatcagcctctgggaggtattcagcgaaggtcgctgtccgagagttgacaaactgt

SEQ ID NO: 2638 - DNA, 120 bp, synthetic construct
  source 1..120: mol_type = other DNA
tagaaatgcaatatcatgtcagtataaacgtggagttccatatgatggaaatcgcggtctacgtgttgtctgcactgcgtctgtgctcggcgagcaattcggcgtggcttgacaacctgt

SEQ ID NO: 2639 - DNA, 111 bp, synthetic construct
  source 1..111: mol_type = other DNA
tagaaatgatgtataatgtaatctgcgatggagactatatgatgataatcgtacacctcatgacaatgttgttgtcttggctcagcaagcgcaacggcattgacaatctgt

SEQ ID NO: 2640 - DNA, 120 bp, synthetic construct
  source 1..120: mol_type = other DNA
cagatatgatttactgtaccattgtcacaggagtgttcgacatgtgtctactggcttactgtggctgctcaactgaacgactcttgcattgctgcaggaactttctggttgacagcttgt

SEQ ID NO: 2641 - DNA, 111 bp, synthetic construct
  source 1..111: mol_type = other DNA
tagaaatgatgtataatgtaatctgcgatggagactatatgatgataatcgtacacctcatgacaatgttgttgtcttggctcagcaagcgcaacggtattgacaatctgt

SEQ ID NO: 2642 - DNA, 132 bp, synthetic construct
  source 1..132: mol_type = other DNA
taggattgacgtatcatgtcagcgtcacacttggagtacctatgaatataagtatccgtgggctgctagtctcattgctcgtcaccgtcggttacgtaaccgtcggtgccgtcatgggacttgacagcttgt

SEQ ID NO: 2643 - DNA, 111 bp, synthetic construct
  source 1..111: mol_type = other DNA
tagaaatgatgtataatgtaatctgcgatggagactatacgatgttaatcttacgcttcatgacgatgtgtttatcttggctctgcaaggataaatacattgacaatctgt

SEQ ID NO: 2644 - DNA, 117 bp, synthetic construct
  source 1..117: mol_type = other DNA
tagaaacactgtataatgtaatcagcatgacggagagccttatgagcatcatccacctgtttgtcagcctctggtcggtgtgcagcgaaggtcgctggccgagagttgacgaactgt

SEQ ID NO: 2645 - DNA, 117 bp, synthetic construct
  source 1..117: mol_type = other DNA
tagaaacactgtataatgtaatcagtatgatggagaccgttatgagcatcgtccacttgttggtcatactctggtcggtttgcagcgaagttagctgtccgagagttgacaaactgt

SEQ ID NO: 2646 - DNA, 117 bp, synthetic construct
  source 1..117: mol_type = other DNA
tagaaacactgtataatgtaattaatatcatggagacccttatgagcatcatccacttgttagccagcctctgtgcggaatgcagtcatggttgctgcccgggagttgacaaactgt

SEQ ID NO: 2647 - DNA, 117 bp, synthetic construct; identical to SEQ ID NO: 2637
  source 1..117: mol_type = other DNA

SEQ ID NO: 2648 - DNA, 111 bp, synthetic construct; identical to SEQ ID NO: 2639
  source 1..111: mol_type = other DNA

SEQ ID NO: 2649 - DNA, 117 bp, synthetic construct
  source 1..117: mol_type = other DNA
tagaaacactgtataatgtaatcagtatcatggagaccgttatgagcatcgtccacctgttaatcagcctctgggaggtattcagcgaaggtcgctgtccgagagttgacaacctgt

SEQ ID NO: 2650 - DNA, 117 bp, synthetic construct
  source 1..117: mol_type = other DNA
tagaaacactgtataatgtaatcaggatcatggagaccgttatgagcatcgtccacttgttattcagcttctggtggcaataccgcgagggttgctacgagagagttgacaaactgt

SEQ ID NO: 2651 - DNA, 120 bp, synthetic construct
  source 1..120: mol_type = other DNA
tagaaatgcaatatcatgtcagtatcgacttggagatccgtatgacggaaatcgcggtctatgtgttgtctgctctgcatctatgctcttcgagcaattcggcgtggcttgacaacctgt

SEQ ID NO: 2652 - DNA, 117 bp, synthetic construct
  source 1..117: mol_type = other DNA
tagaaacactgtataatgtaatcagcttaatggagaccgttatgagcatcgtccacctgttgttcagtctctggtcggcgtgttgcgaagctcgctggcccggactggacaaactgt

SEQ ID NO: 2653 - DNA, 117 bp, synthetic construct
  source 1..117: mol_type = other DNA
tagaaacactgtataatgtaatcagtattatggagaccgttatgagcatcgtccacttgttggtcatactctggtcggtttgcagcgaagttagctgtccgagagttgacaaactgt

SEQ ID NO: 2654 - DNA, 120 bp, synthetic construct; identical to SEQ ID NO: 2638
  source 1..120: mol_type = other DNA

SEQ ID NO: 2655 - DNA, 117 bp, synthetic construct
  source 1..117: mol_type = other DNA
acaataccaattatgctattactgtaacattaactgtggagacatctatgaagacgcttatccatgtattgctgtcaatctactcaataagcttagtgagtggacttgacagcttgt

SEQ ID NO: 2656 - DNA, 111 bp, synthetic construct
  source 1..111: mol_type = other DNA
tagacttactatataatatgataagaggtgaagaatatatgaatactctacccgttacgttgatacatttagctttgttcatgaacgaagctgaatgtatttacatactat

SEQ ID NO: 2657 - DNA, 117 bp, synthetic construct; identical to SEQ ID NO: 2637
  source 1..117: mol_type = other DNA

SEQ ID NO: 2658 - DNA, 117 bp, synthetic construct
  source 1..117: mol_type = other DNA
tagaaacactgtataatgtaatcagcataatggagacagtaatgagcatcatccacttgttagtcagcctctggtcggtgttcagcgaaggtcgctggccgggagttgacaaactgt

SEQ ID NO: 2659 - DNA, 129 bp, synthetic construct
  source 1..129: mol_type = other DNA
tcgagattatggactatatagactgtctgaagatattctcttcaggcgccttgagcgtccagcttcacatggaggtccagatggacatcgcaatgatcgcgctggctgccttcgggcttgacagcttca

SEQ ID NO: 2660 - DNA, 120 bp, synthetic construct
  source 1..120: mol_type = other DNA
tagcaatgatatatactattaacttagaaatcaccatgaagctacaaatgtgcaaccctgcgataactatgctgtcaatctgtttattggcttacctaccaaatagacttgacaacttgt

SEQ ID NO: 2661 - DNA, 123 bp, synthetic construct
  source 1..123: mol_type = other DNA
caacaaactcgttatgttactatggaggtgcaatcgcattgatatacacggagcacagtctcaagataattatagtcaggatactaatcgtcactatgtggcgaattgtccttgacgtttcaa

SEQ ID NO: 2662 - DNA, 135 bp, synthetic construct
  source 1..135: mol_type = other DNA
taaagatgagttatactcaaacaataactatcaaggatgaaaatatgacaataatcatcatacatttcctgtggatagccctgtcttggttggcggcaagtttccaagcctaccttgaccttgacagtctgctga

SEQ ID NO: 2663 - DNA, 120 bp, synthetic construct
  source 1..120: mol_type = other DNA
tagaaatgaagtatcatctcagtatggacatggaggtctgcatggtgcagctcgcagtctggttgctatcatccttctcgttctgctcggcgagcggcacgattgtggttgacaacctgt

SEQ ID NO: 2664 - DNA, 129 bp, synthetic construct
  source 1..129: mol_type = other DNA
caagattgtgtagccacgtattggaggaactaatcatggagaccgttgtcgaactgaccattgtcgtaacgatagccctgctccgctgggccgtatgcgcgtattgcgtgcacggacctggcgtggtaa

SEQ ID NO: 2665 - DNA, 132 bp, synthetic construct
  source 1..132: mol_type = other DNA
caagattgttgtgtagccacgtttcggaggaacttatggtcacgattgtggtcgaactgatgtcgagccttgtcgctcacctcgtccgggtggcggtcgcagcatgctgcggtcgctctcctagcgtactaa

SEQ ID NO: 2666 - DNA, 132 bp, synthetic construct
  source 1..132: mol_type = other DNA
caagattatggtgtagcctcgtttcggaggaacttgtggtaacgattatggtcgaactgttgtcgagcctcgtcgctcacctcgttcggtcggcgatcgcagcatgctgcgggcgccctcctagcgtgctaa

SEQ ID NO: 2667 - DNA, 129 bp, synthetic construct
  source 1..129: mol_type = other DNA
tcgagatagtggactatattagctgcatgtacgattgctcgtcatgtaccttaagcgtccagtttcatgcggaggtccggatggacatcatggcattactgctggtggccttcgggcttgacagcttca

SEQ ID NO: 2668 - DNA, 132 bp, synthetic construct
  source 1..132: mol_type = other DNA
taggatcgacgtataatgtcagcgtcacacttggagtacctatgaagataagtatccgagcgctgctagccgcactgctggtcaccttgggtggtttcacctgggatgccgccttggggcttgacagcttgt

SEQ ID NO: 2669 - DNA, 114 bp, synthetic construct
  source 1..114: mol_type = other DNA
tagaaatgtattaccatgttaccaaggaggcgatgatgctgttcctcgtcacgatggcggtgtcagtctggtttgccagtcaggtgtctgcgcgggctgcagttgacatcatgt

SEQ ID NO: 2670 - DNA, 135 bp, synthetic construct
  source 1..135: mol_type = other DNA
tcgaggcgaatgcctatattagctgtggagcgctgtgcgcgtccgcaaccttcagcatccagtcgtcaatcatggagtatcttatgcagatcgccataaatatcttgctggctgcgttcggtcttgacagcttca

SEQ ID NO: 2671 - DNA, 120 bp, synthetic construct
  source 1..120: mol_type = other DNA
cagatatgatttataatatcgttatcacaggagttactagtatgagtctgatagacctatacagaacaattatctgtgtctgttcaagtgtcaaccattggttaatacttgacagcatgt

SEQ ID NO: 2672 - DNA, 120 bp, synthetic construct
  source 1..120: mol_type = other DNA
cagatatgatgtgtaatatcgttatcacaggagtgttaggaatgaatccagtagttacctgcggctgttcaagacagttagtattccagattgtttggaactttctgcttgacagcttgt

SEQ ID NO: 2673 - DNA, 99 bp, synthetic construct
  source 1..99: mol_type = other DNA
tagcaatgtcgtacagtactctggagatcgccatgcggctaaatatccaattgcagctgccaagctgttccggctgggccgggtggcttgacatcctgt

SEQ ID NO: 2674 - DNA, 117 bp, synthetic construct
  source 1..117: mol_type = other DNA
taagagtggagtacactcaccataacttgattacggaggcgcatttatgcaatacgacacatcataatcccgctcgtcttgtcgcgcattgataccaatgcgtgcttgacaaactgt

SEQ ID NO: 2675 - DNA, 117 bp, synthetic construct; identical to SEQ ID NO: 2674
  source 1..117: mol_type = other DNA

SEQ ID NO: 2676 - DNA, 129 bp, synthetic construct
  source 1..129: mol_type = other DNA
tcgagataatggactatattagctgcatgtacgattgctcgtcatgtaccttgagcgtccagctatacctggaggtccggatggacatcatggcatacctgctggcggccttcgggcttgacagcttca

SEQ ID NO: 2677 - DNA, 129 bp, synthetic construct; identical to SEQ ID NO: 2676
  source 1..129: mol_type = other DNA

SEQ ID NO: 2678 - DNA, 129 bp, synthetic construct
  source 1..129: mol_type = other DNA
tcgagataatggactatattagctgcatggacgattgctcgccatgtaccttgagcgtccagctacacatggaggtccggatggacatcatggcaattctgctggcggctttcgggcttgacagcttca

SEQ ID NO: 2679 - DNA, 132 bp, synthetic construct
  source 1..132: mol_type = other DNA
tcgagattatggactatattagctgcatgaacgattgctcgtcatgtaccttcatcgtccagcttcatgcggaggtccggatggacatcatcattgcattactgctggccgccttcgggcttgacagcttca

SEQ ID NO: 2680 - DNA, 129 bp, synthetic construct
  source 1..129: mol_type = other DNA
tcgagataatggactatattggctgcatgtacgattgctcgtcatgtaccttgagcgtccagctatacctggaggtccggatggacatcatggcatacctgctggcggccttcgggcttgacagcttca

SEQ ID NO: 2681 - DNA, 129 bp, synthetic construct
  source 1..129: mol_type = other DNA
tcgagataatggactatattagctgcatgtacgattgctcgtcatgtaccttgagcgcccagctacacctggaggtccggatggacatcatggcatacctgctgttggccttcgggcttgacagcttca

SEQ ID NO: 2682 - DNA, 114 bp, synthetic construct
  source 1..114: mol_type = other DNA
tagaaatgttgtaccatcatttcatggaggcaataatgcacgttccaatcattctggcgctgtcagtctggaagtccgtcctggagggcggcgattctgggcttgacatcatgt

SEQ ID NO: 2683 - DNA, 132 bp, synthetic construct
  source 1..132: mol_type = other DNA
taggattgacgtatcatgtcagcgtcacacttggagtacctatgaatataagtatccgtgggctgctcgtctcattactcgtcaccgtcggttacgtaaccgtcggtgccgtcatgggacttgacagcttgt

SEQ ID NO: 2684 - DNA, 135 bp, synthetic construct
  source 1..135: mol_type = other DNA
tataattagtatattgaattggttaattatgacgattggaggtatccaaatgccaagttattcagaagcgttatcgattgtaattagctgggtcagccttgtgattacaattgagataaagcttgacagaaattc

SEQ ID NO: 2685 - DNA, 135 bp, synthetic construct
  source 1..135: mol_type = other DNA
tatacttagtatactgaattggttgcttatgacgaatggaggtttccaaatgccaagttacttagaagcattatcgattgtacttagctcggtaaatcttaccgtgacaattgagataaggcttgcaagaagttc

SEQ ID NO: 2686 - DNA, 117 bp, synthetic construct
  source 1..117: mol_type = other DNA
tcaatatcgaatatgctatcactgtaacagtaacactggaggtatctatgaagacactcatctatgcattgctgtcattctgcacaacaagcttgttggacaggtttgacagcttgt

SEQ ID NO: 2687 - DNA, 117 bp, synthetic construct
  source 1..117: mol_type = other DNA
tcaatatcgaatatgctatcactgtaacagtaacactggaggtatctatgaagacactcatctatgcattgctgtcattctgcacaacaagcttgttggacaggtttgacagcctgt

SEQ ID NO: 2688 - DNA, 117 bp, synthetic construct
  source 1..117: mol_type = other DNA
tcaatatcgaatatgctatcactataacagtaacactggaggtatctatgaagacactcatctatgcattgctgtcattctgcacaacaagcttgttggacaggtttgacagcctgt

SEQ ID NO: 2689 - DNA, 129 bp, synthetic construct
  source 1..129: mol_type = other DNA
taaacatggtttatcatgttgatttacaactactactcaaaggatactttctaatgaaattaatcttctttcgcagctggcggatggcaattctgctgatcagtctgatcagcggacttgacatccagc

SEQ ID NO: 2690 - DNA, 114 bp, synthetic construct
  source 1..114: mol_type = other DNA
tagaaatgtattaccatgtaatcaaggagatcgttatgcagatcgtctatatgattgtgctgtcgatcttccggtcaagcgctgcgcttgattccagggagattgacatcatgt

SEQ ID NO: 2691 - DNA, 120 bp, synthetic construct
  source 1..120: mol_type = other DNA
taggaatgcagtatcatgtcagtgttaacttggagattcgcgtaatggaattcttcgtcaacgtgctgttcgcaatgcttggactctctacgagatgcccggcatggcttgacaacctgt

SEQ ID NO: 2692 - DNA, 111 bp, synthetic construct
  source 1..111: mol_type = other DNA
tagaaatactatataatgtaatatcaactggagaaactatgaaagtcctacactcgatggcgatacatttggctttgttcatgaaccaagcggaatgtattgtcattctat

SEQ ID NO: 2693 - DNA, 111 bp, synthetic construct
  source 1..111: mol_type = other DNA
tagaaatactatataatgtaatatcaactggagaaactatgaaagtcctgcactcgatggctatacatttggctttgttcatgaaccaagcggaatgtattgtcattctat

SEQ ID NO: 2694 - DNA, 156 bp, synthetic construct
  source 1..156: mol_type = other DNA
gagacttcttaaaacgaatgttacacttaccataaggaggtaattataactgtgattagtttattcaatgtcgaagatccgagtttaatagcgttggttctcaacatctggtggtttagcgagtttattaacgttaagaaacttgctaaacttcga

SEQ ID NO: 2695 - DNA, 120 bp, synthetic construct
  source 1..120: mol_type = other DNA
cagatatgatatatgataccatcatcgcaggagtgttcgacgtgagtctactagtcagctgcggccatgcaagtcgtctgctagccagtgtactggtgagcgttctacttgacagcttgt

SEQ ID NO: 2696 - DNA, 120 bp, synthetic construct
  source 1..120: mol_type = other DNA
cagatatgatatatgataccatcatcgcaggagtgttcgacgtgagtctactagccatctgcggccatgcaagtcgtctgctagccagtgtactggtgcgcgttctacttgacagcttgt

SEQ ID NO: 2697 - DNA, 120 bp, synthetic construct
  source 1..120: mol_type = other DNA
cagatatgatatatgataccatcatcgcaggagtgttcgacgtgagtctactagccatctgcggccatgcaagtcgtctgctagccagtgtactggtgagctttctacttgacagcttgt

SEQ ID NO: 2698 - DNA, 120 bp, synthetic construct; identical to SEQ ID NO: 2696
  source 1..120: mol_type = other DNA

SEQ ID NO: 2699 - DNA, 129 bp, synthetic construct
  source 1..129: mol_type = other DNA
tcgagataatggactattctggctgtatgaagatattctcttcatgggccttgagcgtccagcttcacatggaggtccgattggacgtcataatgatcgtgctggctgccgtcgggcttgacagcttca

SEQ ID NO: 2700 - DNA, 129 bp, synthetic construct; identical to SEQ ID NO: 2659
  source 1..129: mol_type = other DNA

SEQ ID NO: 2701 - DNA, 144 bp, synthetic construct
  source 1..144: mol_type = other DNA
tcaacgatacatgttatactgccggtatcgagataatgatggccatggccagcatcttgatacagtcgctgatatcgaaactaaccacaggagttatcccattgattaagatgatattgactgtcttcccaattgacagtgtaa

SEQ ID NO: 2702 - DNA, 144 bp, synthetic construct
  source 1..144: mol_type = other DNA
ttaacgaaacatgctattctgtcactgcggagatattgtcgactattgtcggcatcatcaccaggaagattggaaagcgaacaaccatcggagtaatgttgatgatcgcagcgctattaaccgcctttccgattgacagtataa

SEQ ID NO: 2703 - DNA, 132 bp, synthetic construct
  source 1..132: mol_type = other DNA
taggatcgacgtatagtgtcagcgtcacatttggagtacctatgaagataagtatccgagggctgctggccgcattgctggtcaacctgggttgttatacctgggatgccgccttggggcttgacagcttgt

SEQ ID NO: 2704 - DNA, 132 bp, synthetic construct
  source 1..132: mol_type = other DNA
taggatcgacgtatagtgtcagcgtcacatttggagtacctatgaagataagtatccgagggctgctagccgcattgctggtcaccctgggttgttacacctgggatgccgccttggggcttgacagcttgt

SEQ ID NO: 2705 - DNA, 132 bp, synthetic construct
  source 1..132: mol_type = other DNA
taggatcgacgtatagtgtcagcgtcacacttggagtacctatgaatataagtatccgagggctgctggccgcattgctggtcaccctgggtggttacacttgggataccgccttggggcttgacagcttgt

SEQ ID NO: 2706 - DNA, 132 bp, synthetic construct
  source 1..132: mol_type = other DNA
taggatcgacgtatagtgtcagcgtcacatttggagtacctatgaagataagtatccgagggctgctggccgcattgctggtcaccctaggttgttacacctgggatgccgccttggggcttgacagcttgt

SEQ ID NO: 2707 - DNA, 132 bp, synthetic construct; identical to SEQ ID NO: 2628
  source 1..132: mol_type = other DNA

SEQ ID NO: 2708 - DNA, 132 bp, synthetic construct
  source 1..132: mol_type = other DNA
taggatcgacgtatagtgtcagcgtcacatttggagtacctatgaagataagtatccgagggctgctggccgcattgctggtcaacctgggttgttacacctgggatgccgccttggggcttgacagcttgt

SEQ ID NO: 2709 - DNA, 132 bp, synthetic construct
  source 1..132: mol_type = other DNA
taggatcgacgtatagtgtcagcgtcacacttggagtacctatgaagataagtatccgagggctgctggccgcattgctggtcaccctgggttgttatacctgggatgccgctctggggcttgacagcttgt

SEQ ID NO: 2710 - DNA, 132 bp, synthetic construct
  source 1..132: mol_type = other DNA
taggatcgacgtatagtgtcagcgtcacacttggagtacctatgaagataagtatccgagagctgctggccgcattgctggtcaccctgggttgttacacctgggatgccgccttggggcttgacagcttgt

SEQ ID NO: 2711 - DNA, 132 bp, synthetic construct; identical to SEQ ID NO: 2628
  source 1..132: mol_type = other DNA

SEQ ID NO: 2712 - DNA, 135 bp, synthetic construct
  source 1..135: mol_type = other DNA
taggagagacatatacttatgtcagcgttacagtgtggttccgcatgaatcacgttacccgtctgctgctggccgtcgccatggttgccttaggtatcgctacctctggttgcctggcggggcttgacagcctgt

SEQ ID NO: 2713 - DNA, 144 bp, synthetic construct
  source 1..144: mol_type = other DNA
tcgacgtggtcgtgtatactgtgaaacaactggcaatgtggtattgccgaattgccgcaaagccgcccgcgtggctggcgagaggagcccgaatgatcgaactcgcgtcttgcaccggctgcgaaactggccttgacagtttaa

SEQ ID NO: 2714 - DNA, 144 bp, synthetic construct
  source 1..144: mol_type = other DNA
tcaacgatacatgttatactgccggtatcgagataatgatggccatggccatcatcttgatacagtcgctgatatcgaacctaaccacaggagctatcccattgattaagatgatattgactgtcttcccgattgaccgtgtaa

SEQ ID NO: 2715 - DNA, 99 bp, synthetic construct
  source 1..99: mol_type = other DNA
tagcaatgtcgtacactgttctggaggcaactatgaagttgacaatccaagtgagtccatcaagttgctccggctatgccggatggcttgactttctgt

SEQ ID NO: 2716 - DNA, 144 bp, synthetic construct
  source 1..144: mol_type = other DNA
ttgacgtggtcgtatacactgtgacgcacctggcaatgtggtattgccggattgccgcaacgccgcccgcgtggctggcgaaaggagcccgaattatggaactcgcgatctgcaccgccccggaagctggccttgacagtttaa

SEQ ID NO: 2717 - DNA, 138 bp, synthetic construct
  source 1..138: mol_type = other DNA
tcgacgtggtcgtgtatactgtgcaagcggtggtctggctgagccagattgccgtccagcggccaggtcacgataaaggagaacatgtattggaactcgcattatgcgtaacagaagcactaggacttgacagtttaa

SEQ ID NO: 2718 - DNA, 114 bp, synthetic construct
  source 1..114: mol_type = other DNA
tagaaatgtattaccatgtaatcatggaggcaataatgaaactcattgtccagattgtgctgtcgattgtgctttcaggccatgttgcgggcttcagcgggcttgacatcatgt

SEQ ID NO: 2719 - DNA, 120 bp, synthetic construct
  source 1..120: mol_type = other DNA
cagatatgatatatgataccatcatcgcaggagtgttcgacgtgagtctactagccatctgcggccatgcaagtcgtctgctagccagtgtactggtgagcgttctacttgacagcttgt

SEQ ID NO: 2720 - DNA, 114 bp, synthetic construct
  source 1..114: mol_type = other DNA
taggaatgacgtacaatgttcacatgctactggaggtatccttgcggaatcctgtcatcgcgctgctatcaatcgtcctggcgatcacgctgccgggcggaattgacaacttgt

SEQ ID NO: 2721 - DNA, 129 bp, synthetic construct
  source 1..129: mol_type = other DNA
tagagatgacatataatgtcagtatcacaatcacattggagatcgttatgaagctagaccccagttgcgcgatgtcgttgcattctctggctcgttttcacgtatgcttgcaaatgcttgacatcctgt

SEQ ID NO: 2722 - DNA, 129 bp, synthetic construct
  source 1..129: mol_type = other DNA
taagaatgtgttatactaacactatggaggacaactttatgttcataggaacactaatcatcctgaccattggccagatgtcattatctcagcaatgtctatacattaactttcgacttgacatcctgt

SEQ ID NO: 2723 - DNA, 120 bp, synthetic construct
  source 1..120: mol_type = other DNA
tagaaatggattatactataactataaccttggaagtatctatgaagaccttattccagttcctgctgtctatctgctcagtttgctttggttgcattccgattggacttgacagcctgt

SEQ ID NO: 2724 - DNA, 153 bp, synthetic construct
  source 1..153: mol_type = other DNA
tcggcagcgttaccagagcatcgccacctaacgcgaaaaactacatgtgctaacctaacgatggaggtcggaagatgagccgcaagctgctgaaagccacgctgtggatattcaggctcgtgtcgctggcgaagttcgccgttgacgtcatca

SEQ ID NO: 2725 - DNA, 120 bp, synthetic construct; identical to SEQ ID NO: 842
  source 1..120: mol_type = other DNA

SEQ ID NO: 2726 - DNA, 120 bp, synthetic construct
  source 1..120: mol_type = other DNA
tagaaatgcagtatcatggcagtattatcgtagaggtccgtatgacggaagtcctgttctacgtgttgtccgcgttgcgtctcagctcatggagcggattcgcgtggcttgacaacctgt

SEQ ID NO: 2727 - DNA, 120 bp, synthetic construct
  source 1..120: mol_type = other DNA
taataatgatatatactaataatcatggggcattggaggtcccgagtaacatggaaacaataatgttcatgatagcgtcagttactttaagatttctcttgcagtaccttgacaaactgt

SEQ ID NO: 2728 - DNA, 120 bp, synthetic construct
  source 1..120: mol_type = other DNA
tagaaatgaagtatcatgtcagtatcgacgtagaggtccgtatgacggagatcatagtctatgcgttatcagcgctgcgtctctgctcttggagccgttcggcgtggcttgacaacctgt

SEQ ID NO: 2729 - DNA, 132 bp, synthetic construct
  source 1..132: mol_type = other DNA
cacatatgatgtataatatcattgcgtcacagggaactatcggcatgtttcagctaatcgttatgtgcggctgctcaaggcatgtggtcaccagttatggttgctggctccaattgctacttgacagcttgt

SEQ ID NO: 2730 - DNA, 120 bp, synthetic construct
  source 1..120: mol_type = other DNA
tagaaatgaaatatcatgtcagtatcgacgtagaggtccgtatgacggaaatcctagtctatgcgttgtctgcgctgcgtctctgctcgtggagcggttcggcatggcttgacaacctgt

SEQ ID NO: 2731 - DNA, 132 bp, synthetic construct
  source 1..132: mol_type = other DNA
taggatcgacatataatgtcagcgtcacacttggagtatctatgaagataagtctccgtgggctgctggccgcattgctggtaatcgtaggatgttattcctccggaaccgccttggggcttgacagcttgt

SEQ ID NO: 2732 - DNA, 132 bp, synthetic construct; identical to SEQ ID NO: 2731
  source 1..132: mol_type = other DNA

SEQ ID NO: 2733 - DNA, 120 bp, synthetic construct; identical to SEQ ID NO: 2600
  source 1..120: mol_type = other DNA

SEQ ID NO: 2734 - DNA, 135 bp, synthetic construct; identical to SEQ ID NO: 2662
  source 1..135: mol_type = other DNA

SEQ ID NO: 2735 - DNA, 144 bp, synthetic construct
  source 1..144: mol_type = other DNA
acgacgtgatagtgtatactgtagtaaagctgacaatctggtattgtcggattacctacaagatgcgctgcgcactggcggaaggagccccgattatggaacaagcaatctgcactggcctaacaacgagccttgacagtttaa

SEQ ID NO: 2736 - DNA, 120 bp, synthetic construct
  source 1..120: mol_type = other DNA
ttaacatcttggcgtacaatcgtacggccggtcatggagacctcatcatgcccattgggcactctgcgatctggtgcaagctgatcgtcgcattcgcgaacatcgttcttgcgtccatta

SEQ ID NO: 2737 - DNA, 108 bp, synthetic construct
  source 1..108: mol_type = other DNA
tagaaatgatttattatgtaatcacaggagactatacgatgataaccttacgcttcctatccatgaccttctcttggctagccaagagtaaatacattgacaatctgt

SEQ ID NO: 2738 - DNA, 114 bp, synthetic construct
  source 1..114: mol_type = other DNA
tcgatgtaatcgtctatattgtcagtatgctaacaagcatatggcatcgtcgtcatcataaggaaatcctaatggacatcattataaatattctcggaaaccttgacagtttca

SEQ ID NO: 2739 - DNA, 114 bp, synthetic construct
  source 1..114: mol_type = other DNA
tcgatgtaatcgtctatattgtcagtatgctgtccagcatatggcatcgtcgtcatcacaaggaaatcctaatggatctcatcataaatattctcggaaaccttgacagtttca

SEQ ID NO: 2740 - DNA, 120 bp, synthetic construct
  source 1..120: mol_type = other DNA
tcgacgtaatcgtctatactgtcatcaggatgctatgcgcattctgctggcatcgtccgatatcaaaggagagcgcaatggaactcgcattgaataccttcataagccttgacagcttca

SEQ ID NO: 2741 - DNA, 141 bp, synthetic construct
  source 1..141: mol_type = other DNA
tcgaccatgccgtgtatgctatcatattggtggcaactatgttgctccgatatgctggcaagacgccgtggtggcttaccgtaggagcccagattatgaaactcgcaatcagtagtcacacattttgccttgacagtgaaa

SEQ ID NO: 2742 - DNA, 147 bp, synthetic construct
  source 1..147: mol_type = other DNA
tataattgagcgggaagcttgtgtcactaccttctggatgtgtctggcggcggccaccatctggtgggatcccagtcagtcactccaacttcaagctctcctgtgcagtctcctgacagaaattatgaagaaagggttgacaacaat

SEQ ID NO: 2743 - DNA, 153 bp, synthetic construct
  source 1..153: mol_type = other DNA
tgcatatgatttattatatcattacctcagtctcacaaggaggactaaagatgcgtattaccataaatattcatattaagcatattcatatctacagcattgtcatcggaataatcatccatcactgggaggttattctggttgacatcatgt

SEQ ID NO: 2744 - DNA, 153 bp, synthetic construct
  source 1..153: mol_type = other DNA
tgcatatgatctataatatcattgcttcagtctcacgaggaggactaaagatgcgtattaccataaatattcatattaagcatattcatatctacagcattgtcatcggaataatcaccaataactggaggattattctggttgacatcatgt

SEQ ID NO: 2745 - DNA, 123 bp, synthetic construct
  source 1..123: mol_type = other DNA
ttgcatagcatacctgcatatcaacctagaggtccaaatgaacatattgttaatattgccgctatattctgcttatagcttagttgacaactataatagaaactctgaatccaaaacgatcca

SEQ ID NO: 2746 - DNA, 141 bp, synthetic construct
  source 1..141: mol_type = other DNA
taaagatgaattataatcaaacagatataattaccaaggagttaaacatgacaataatctatgccatgcgtttcctgttgataatactgtcatggtctatggcaactttcgaagcctataatgaccttgacagtctgctga

SEQ ID NO: 2747 - DNA, 120 bp, synthetic construct
  source 1..120: mol_type = other DNA
tagacatggtttataatgtcagtatcacgttggagatcacaatgaaatgtaacctcgccacgcggatgtcgtatgccgtgttggcagcgattagctgtcaatttggtgttgacatcttgt

SEQ ID NO: 2748 - DNA, 120 bp, synthetic construct
  source 1..120: mol_type = other DNA
tagacatggtttataatgtcagtatcacgttggagatcacaatgaaatgtaacctcgccacgcggatgtcgtatgccgtgttggcagcaattagctgtcagtttggtgttgacatcttgt

SEQ ID NO: 2749 - DNA, 138 bp, synthetic construct
  source 1..138: mol_type = other DNA
tcaacgcagtcgagtacgctggacgcgcaaccctcatcgggttgtcggccatcctgccaggatgttccgtcgatccgaccatggagatgaccttgtcgatcatcaacctgatcttcgcggcgagacttgacaggctta

SEQ ID NO: 2750 - DNA, 129 bp, synthetic construct
  source 1..129: mol_type = other DNA
tagacatgtgttataatgtcagtatcacagtggaaatcacaatgaaattgcaagtcaccaactggatcgtgtcaatcttcattgaacttatcgcattctgcgtaggtccaatttgtattgacagcttgt

SEQ ID NO: 2751 - DNA, 120 bp, synthetic construct
  source 1..120: mol_type = other DNA
caggtatgatgtataatatcatagtgtcaggagtgttcgacatgagtctattaaccgcctgtcatagcttcaagaagcgcctgttccagttcatggttcaggtagcccttgacagcttgt

SEQ ID NO: 2752 - DNA, 129 bp, synthetic construct
  source 1..129: mol_type = other DNA
acgatttcgagtatactgaaacagtatggatcatcgagacttacgtctttgccgatccttccacattcattctaaccagcgaggcaactatgtaccaaaccagcgcgaatttagcggttgacagtataa

SEQ ID NO: 2753 - DNA, 117 bp, synthetic construct
  source 1..117: mol_type = other DNA
tagaaacactgtataatgtgactagtagtatggagaccgttatgagcatcttccaagtgttgtataccgtctggtcagcgagctttgcaggacgctgttcatggcttgacaacctgt

SEQ ID NO: 2754 - DNA, 117 bp, synthetic construct
  source 1..117: mol_type = other DNA
tagaaacactgtataatgtgactagtaatatggagatcgttatgagcatcttccaagtgttgtataccatctggtcagcgagctttgcaggacgctgtccatggcttgacaacctgt

SEQ ID NO: 2755 - DNA, 117 bp, synthetic construct
  source 1..117: mol_type = other DNA
tagaaacactgtataatgtgactagtaatatggagaccgttatgagcatcttccaagtgttgtataccgtctggtcagcgagctttgcaggacgctgtccatggcttgacaacctgt

SEQ ID NO: 2756 - DNA, 129 bp, synthetic construct
  source 1..129: mol_type = other DNA
tataatcagtatattaaattggttgacgattggaggtatccaaatgccaagttattcagaagcgttatcgattgtaattgactggataagtattatgattacaattgagataaagcttgacagaaattc

SEQ ID NO: 2757 - DNA, 117 bp, synthetic construct
  source 1..117: mol_type = other DNA
ttgaaacactgtataatgtaatcagtatcatggagaccgttatgagcatcgtccacttgttggtcagcctctggtcggtgttcagcgaaggtcgctggccgggagttgacaaactgt

SEQ ID NO: 2758 - DNA, 120 bp, synthetic construct
  source 1..120: mol_type = other DNA
cagatatgatatatgataccatcatcgcaggagtgttcgacgtgagtctactaaccatctgcggccatgcaagtcgtctgctagccagtgtactggtgcgcgttctacttgacagcttgt

SEQ ID NO: 2759 - DNA, 144 bp, synthetic construct
  source 1..144: mol_type = other DNA
aagccattgcaaccattgtcaccaaggaggtctactggatgacgataagaatcatcatgttaatagcagaagtgctcactggatgccactggatcagatttatactgatagccattatgagcatctacgcacttgacaaaagat

SEQ ID NO: 2760 - DNA, 144 bp, synthetic construct
  source 1..144: mol_type = other DNA
aagccattgtaaccattgtcaccaaggaggtctactggatgacgataagaatcatcatgttaatagcagaagtgctcactggatgccactggatcagatttatactgatagccattatgagcatctacgcacttgacaaaagat

SEQ ID NO: 2761 - DNA, 117 bp, synthetic construct; identical to SEQ ID NO: 838
  source 1..117: mol_type = other DNA

SEQ ID NO: 2762 - DNA, 132 bp, synthetic construct
  source 1..132: mol_type = other DNA
taggatcgacgtatagtgtcagcgtcacacttggagtacctatgaagataagtatccgagggctgctggccgcattgctagtcaccctgggttgttacacctgggatgccgccttggggcttgacagcttgt

SEQ ID NO: 2763 - DNA, 132 bp, synthetic construct; identical to SEQ ID NO: 2628
  source 1..132: mol_type = other DNA

SEQ ID NO: 2764 - DNA, 129 bp, synthetic construct
  source 1..129: mol_type = other DNA
tagatatgaattataatgtaactataaccttggagacatctatgaaacttaggataaccttcgtcgagatgttgttatcgttcctatcgttaagcttattcggcgtccagatagtacttgacaacatgt

SEQ ID NO: 2765 - DNA, 129 bp, synthetic construct
  source 1..129: mol_type = other DNA
tagatatgaattataatgtaactataaccttggagacatctatgaaacttaggataagcttcgtcgagatgttgttatggtttctatcgttaagcttattaggcgttccgatagtacttgacaacatgt

SEQ ID NO: 2766 - DNA, 132 bp, synthetic construct
  source 1..132: mol_type = other DNA
taggatcgacgtataatgtcagcgtcacacttggagtacctatgagaataagtatccgagcgctgctgtccgcactgctggtcaccctgggttatttcacctgtggtgccgcgataggacttgacagcttgt

SEQ ID NO: 2767 - DNA, 135 bp, synthetic construct
  source 1..135: mol_type = other DNA
tataatcagtatattaaattggttgtttatgacgattggaggtatccaaatgccaagttattcagaagcgttatcgattgtaatcgactgggtaagtattatgattacaattgagataaagcttgacagaaattc

SEQ ID NO: 2768 - DNA, 141 bp, synthetic construct
  source 1..141: mol_type = other DNA
aacaattattatataatcatcttataatgattagcgtaggagttgattgtagaatgcctaacgatatcgacatgagaattgtaatcttactatttagcatagtaatcgaacaatcgtgcgactatctgcttgacaacatca

SEQ ID NO: 2769 - DNA, 132 bp, synthetic construct; identical to SEQ ID NO: 2703
  source 1..132: mol_type = other DNA

SEQ ID NO: 2770 - DNA, 132 bp, synthetic construct
  source 1..132: mol_type = other DNA
taggatcgacgtataatgtcagcgtcacacttggagtacctatgaagataagtatccgagggctgctggccgcattgctggtcacctttggttgttatacctgggatgccgccatggggcttgacagcttgt

SEQ ID NO: 2771 - DNA, 129 bp, synthetic construct
  source 1..129: mol_type = other DNA
tataatcagtatattaaattggttgacgattggaggtatccaaatgccaagttattcagaagcgttatcaattgtaattgactggataagtattatgattacaattgagataaagcttgacagaaattc

SEQ ID NO: 2772 - DNA, 135 bp, synthetic construct
  source 1..135: mol_type = other DNA
tataattagtatattgaattggttgattatgacgattggaggtatccaaatgccaagttattcagaagcattatcgattgtaattagctgggtcagccttgtgattacaattgagataaagcttgacagaaattc

SEQ ID NO: 2773 - DNA, 150 bp, synthetic construct
  source 1..150: mol_type = other DNA
taaaacattacactatactcaccctatggaggtaattacaatgttgctaagtttgtctagcaatctagaagtccagctagtgctgttcttgatagaagttactagtttgcttgttgaggttctaaatatttataaccttgacaagcgtga

SEQ ID NO: 2774 - DNA, 132 bp, synthetic construct; identical to SEQ ID NO: 2708
  source 1..132: mol_type = other DNA

SEQ ID NO: 2775 - DNA, 135 bp, synthetic construct
  source 1..135: mol_type = other DNA
tataattagtatattgaattggttgattatgacgattggaggtatccaaatgcccagttattcagaagcaatatcatttgtaattagcttgattagcagtggaattacaattgagataaagcttgacagaaattc

SEQ ID NO: 2776 - DNA, 123 bp, synthetic construct
  source 1..123: mol_type = other DNA
tagaaatggattatactattactataaccgtggaggtatctgtgaagaccctattccatcatgtccagtcgtcttgttggtcggcctgccttattggcttgctgattgtgcttgacaacttgt

SEQ ID NO: 2777 - DNA, 123 bp, synthetic construct
  source 1..123: mol_type = other DNA
ttgaaatgttatatacttacattaaggacaagcacatgctattacacataatactaccttgtttgccggtattcgcattgtttctcggcgtttcgccgggatgcgtaacacttgacattcagt

SEQ ID NO: 2778 - DNA, 120 bp, synthetic construct
  source 1..120: mol_type = other DNA
tagatatgaattatactgtaactataactttggagacatctgtgacgactctattcaatgtattgctgtcattcttctcagttagcttgcttggctttccgattagacttgacaacctgt

SEQ ID NO: 2779 - DNA, 141 bp, synthetic construct
  source 1..141: mol_type = other DNA
aatacttaattgcggtataattacaactaagcaggagattatcgtcatgttcattacaatcttaattctggtcacggtgaccagtatcagacagcctcaaaccatttcttataaatgtttgttagaactgttgacaacaat

SEQ ID NO: 2780 - DNA, 126 bp, synthetic construct
  source 1..126: mol_type = other DNA
tcgaggatattgactatattagttgtgcggcagctttcgcggcccgcaccttcaacgtcccgctaatcttggagatcgtaatgatactcgttcgactgctggtcgccttggggcttgacaacttca

SEQ ID NO: 2781 - DNA, 117 bp, synthetic construct
  source 1..117: mol_type = other DNA
taaatataaattatgctatcactataacaataactctggaggcatctatgaagacacttatccatgtattgctgtcattctgctcaataagcttattgagtaggtttgacagcctgt

SEQ ID NO: 2782 - DNA, 150 bp, synthetic construct
  source 1..150: mol_type = other DNA
taaaacattacactatactcaccctatggaggtaattacaatgttgctaagtttgtctagcaatctagaaatccagctagtgctgttcttgatagaagttactagtttgcttgttgaggttctaaatatttataaccttgacaagcgtga

SEQ ID NO: 2783 - DNA, 135 bp, synthetic construct
  source 1..135: mol_type = other DNA
tataattagtatattgatttggttgattatgacgattggaggtatccaaatgccaagttattcagcagcgttatcgataataattagcttggttaaccaagtgattacaattgagataaagcttgacagaaattc

SEQ ID NO: 2784 - DNA, 144 bp, synthetic construct
  source 1..144: mol_type = other DNA
tcgacgtggccgtgtatactgtggtcgtgctggcaatctggtattgccgcaatgccggtatgccggaccgatatctggcacgaggagcccgaattgtgaaactcgcgcattgcctggacatcgcgacatgccttgacagtagaa

SEQ ID NO: 2785 - DNA, 132 bp, synthetic construct
  source 1..132: mol_type = other DNA
taggatcgacgtatagtgtcagcgtcacatttggagtacctatgaagataagtatccgagggctgctggccgcattgctggtcaccctgggttgttacacctgggatgccgccttggggcttgacagcttgt

SEQ ID NO: 2786 - DNA, 144 bp, synthetic construct
  source 1..144: mol_type = other DNA
tcgacgtgctcgtgtatactgcgaggcaactggcaatctggtattgccgaactgccgcaaagccgcccgcgtggctggcgaagggagcccatatggtggaactcgcaatctgctcagacctcgaatttggccttgacagtataa

SEQ ID NO: 2787 - DNA, 117 bp, synthetic construct
  source 1..117: mol_type = other DNA
taaacataaattatgctatcactataacaataactctggaggtacctatcaagacacttatccaagtattgctgtcattctgctcaattagcttattgagtaggtttgacagcctgt

SEQ ID NO: 2788 - DNA, 117 bp, synthetic construct; identical to SEQ ID NO: 2787
  source 1..117: mol_type = other DNA

SEQ ID NO: 2789 - DNA, 132 bp, synthetic construct
  source 1..132: mol_type = other DNA
taggatcgacgtataatgtcagcgtcacacttggagtacctatgaagataagtatccgagcgctgctggccgcactgatggtcaccctgggtggtttcacctgggatgccgccttggggcttgacagcttgt

SEQ ID NO: 2790 - DNA, 117 bp, synthetic construct; identical to SEQ ID NO: 2787
  source 1..117: mol_type = other DNA

SEQ ID NO: 2791 - DNA, 120 bp, synthetic construct; identical to SEQ ID NO: 2634
  source 1..120: mol_type = other DNA

SEQ ID NO: 2792 - DNA, 141 bp, synthetic construct
  source 1..141: mol_type = other DNA
tcgacgtgttcgcttatattgtcatttacataacaaccgggattaccggaaaccgaagccgcgtcgccggtataaatacaggagcccaacaaatggtactcgaaatctgcatgtacctggccacaggacttgacagtttaa

SEQ ID NO: 2793 - DNA, 123 bp, synthetic construct
  source 1..123: mol_type = other DNA
tataatattattaacagctactttaattcactggtaataggaggtcatacaatggacaatataattcttaatatcatcaactgtatgctattaattctgttcaagaatattcttgacatagat

SEQ ID NO: 2794 - DNA, 135 bp, synthetic construct; identical to SEQ ID NO: 2767
  source 1..135: mol_type = other DNA

SEQ ID NO: 2795 - DNA, 135 bp, synthetic construct
  source 1..135: mol_type = other DNA
tataatcagtatattaaattggttgtttatgacgattggaggtatccaaatgccaagttattcagaagcgttatcgattgtaatcgactgggtaagtattatgattataattgagataaagcttgacagaaattc

SEQ ID NO: 2796 - DNA, 117 bp, synthetic construct; identical to SEQ ID NO: 2781
  source 1..117: mol_type = other DNA

SEQ ID NO: 2797 - DNA, 117 bp, synthetic construct; identical to SEQ ID NO: 2787
  source 1..117: mol_type = other DNA

SEQ ID NO: 2798 - DNA, 132 bp, synthetic construct
  source 1..132: mol_type = other DNA
taggatcgacgtataatgtcagcgtcacacttggagtacctatgaagataagtatccgagcgctgctggccgcactgctggtcaccttgggtggtttcacctgggatgccgccttggggcttgacagcttgt

SEQ ID NO: 2799 - DNA, 123 bp, synthetic construct
  source 1..123: mol_type = other DNA
tagaaatgaattatactattactattaccttggaggtatctatgaagaccctgttccagatattgttatcaatcttatctttggtttcccttgggattccgcaaataggacttgacaacctgt

SEQ ID NO: 2800 - DNA, 129 bp, synthetic construct
  source 1..129: mol_type = other DNA
acgatatcgagtatactgtcacagtatggatcatcgagactcgcgtctttgccgatccttcaaccttcatccacacgagcgaggcgattatgcactacaccacggcgaatttagatgttgacggtataa

SEQ ID NO: 2801 - DNA, 129 bp, synthetic construct
  source 1..129: mol_type = other DNA
tagacatgaattataatataactattaacttggaggtatccataaacattcagaagaccttagtccatgtaatcttatcgttcttatcgtttgcctgttgtggcgttccgatagtacttgacaacatgt

SEQ ID NO: 2802 - DNA, 129 bp, synthetic construct
  source 1..129: mol_type = other DNA
tagacatgaattataatataactataaccatggaggtatctatgaacattgagaacatattagtccagttgttgttatcgttcttatcattagccttgtttggcttaccgatagtacttgacaaactgt

SEQ ID NO: 2803 - DNA, 135 bp, synthetic construct
  source 1..135: mol_type = other DNA
tataattagtatattgaattggttgattatgacgattggaggagtccaaatgccaagttattcagaagcgttatcgattgtaattagctggggcagccttgtgattacaattgagataaagcttgacagaaattc

SEQ ID NO: 2804 - DNA, 126 bp, synthetic construct
  source 1..126: mol_type = other DNA
tcgactttgtagtctatactgtcgtccagatgctacgcacccggcgcgactgcgcctgcgccgatacggagttcaccattctgatggcgatcaatatcattgcaaacttcagccttgacagtttca

SEQ ID NO: 2805 - DNA, 132 bp, synthetic construct
  source 1..132: mol_type = other DNA
taggatcgacgtatcatgtcagcgtcacactgggagtacctatgaagataagtatccgagggctggtagccgcattgctggtcatcttaagtggttataccggggatgcagctttatggcttgacagcttgt

SEQ ID NO: 2806 - DNA, 144 bp, synthetic construct
  source 1..144: mol_type = other DNA
tcgacgtggtcgtgtatactgtgaagcacctggcaatgtggtattgcctgattgccgcaaagccgcccgcgtggctggcgagaggagcccgaatgatcgaactcgcgtcttgcaccggctgcgaaactggccttgacagtttaa

SEQ ID NO: 2807 - DNA, 132 bp, synthetic construct
  source 1..132: mol_type = other DNA
taggatcgacgtatagtgtcagcgtcacatttggagtacctatgagtataagtatccgagggctgctggccgcattgctggtcaccctgggctgttacacctgggatgccgccttggggcttgacagcttgt

SEQ ID NO: 2808 - DNA, 129 bp, synthetic construct; identical to SEQ ID NO: 2765
  source 1..129: mol_type = other DNA

SEQ ID NO: 2809 - DNA, 132 bp, synthetic construct; identical to SEQ ID NO: 2708
  source 1..132: mol_type = other DNA

SEQ ID NO: 2810 - DNA, 129 bp, synthetic construct
  source 1..129: mol_type = other DNA
tagacatgaattataatataactattaaccaggaggcatctatttgtattaagacaaccttagtccatgtgttcttatcgttcgtatcgttggccttgtttggcgttccgatagtacttgacaacatgt

SEQ ID NO: 2811 - DNA, 132 bp, synthetic construct
  source 1..132: mol_type = other DNA
taggatcgacgtatagtgtcagcgtcacatttggagtacctatgaagataagtatccgagggctgctggccgcattgctggtcaccctgggtagttacacctgggatgccgccttggggcttgacagcttgt

SEQ ID NO: 2812 - DNA, 132 bp, synthetic construct
  source 1..132: mol_type = other DNA
taggattgacgtatcatgtcagcgtcacacttggagtacctatgaagataagtatccgagggctgctggccgcactgctggtcaccttgggttgttacacctgggatgccgccttggggcttgacagcttgt

SEQ ID NO: 2813 - DNA, 129 bp, synthetic construct; identical to SEQ ID NO: 2810
  source 1..129: mol_type = other DNA

SEQ ID NO: 2814 - DNA, 120 bp, synthetic construct
  source 1..120: mol_type = other DNA
tagaaatggattatgctataactataaccgtggaggtatctatgaagaccctgttccagttcttgctgcctacctgctcagcttgccttggtggcttgccgattggacttgacaacctgt

SEQ ID NO: 2815 - DNA, 120 bp, synthetic construct
  source 1..120: mol_type = other DNA
tagcaatgacgtataatgtcagcatcacattggaggtatccatgaggacgaccatcgcaacgtgggtgtcaatcgtgtcgggctgccgtattggcggcctggcatggcttgacatcctgt

SEQ ID NO: 2816 - DNA, 132 bp, synthetic construct
  source 1..132: mol_type = other DNA
taggatcgacgtataatgtcagcgtcacacttggagtatctatgaagataactatccgagggctgctggccgcattgctggtcatcttgggttgttacacttgggatgccgccttggggcttgacagcttgt

SEQ ID NO: 2817 - DNA, 129 bp, synthetic construct; identical to SEQ ID NO: 2756
  source 1..129: mol_type = other DNA

SEQ ID NO: 2818 - DNA, 120 bp, synthetic construct
  source 1..120: mol_type = other DNA
tagaaatggattatactgttactataaccgtggaggtatccgtgaggaccctgttccatgtattgttatcgttctgctcagcttaccttactggtttgccggtcatacttgacaacctgt

SEQ ID NO: 2819 - DNA, 120 bp, synthetic construct; identical to SEQ ID NO: 2612
  source 1..120: mol_type = other DNA

SEQ ID NO: 2820 - DNA, 120 bp, synthetic construct
  source 1..120: mol_type = other DNA
tagatatgctgtataatgtaatcagtagcgtggagtcaattatgaatatcatccaagtgttgcttaccgtcgtcacagtgattgggttcaccaagaactgtgggaggcttgacaacctgt

SEQ ID NO: 2821 - DNA, 120 bp, synthetic construct; identical to SEQ ID NO: 2719
  source 1..120: mol_type = other DNA

SEQ ID NO: 2822 - DNA, 117 bp, synthetic construct; identical to SEQ ID NO: 2637
  source 1..117: mol_type = other DNA

SEQ ID NO: 2823 - DNA, 120 bp, synthetic construct
  source 1..120: mol_type = other DNA
tagagatgatatataatgtcatcagcatcttggagagcgtaaccgttatgattcgattagtctcgtcaatccacgcattggcgaccattgtgggagccatggctggtattgacaacctgt

SEQ ID NO: 2824 - DNA, 117 bp, synthetic construct; identical to SEQ ID NO: 2757
  source 1..117: mol_type = other DNA

SEQ ID NO: 2825 - DNA, 114 bp, synthetic construct
  source 1..114: mol_type = other DNA
tagaaatgtattaccatgtagtcatggaggcaattatgaagctaatcgtccagactgtgctatcaatctcgctgtcgtgccatgttgcgggcttcggcgggcttgacatcatgt

SEQ ID NO: 2826 - DNA, 120 bp, synthetic construct
  source 1..120: mol_type = other DNA
cagttatgatgtataatatcatagtgtcaggagtgttcgacgtgagtctattaaccgcctgctgtagcttcaagaagcgcctgttccagttcatggttcaggtagcccttgacagcttgt

SEQ ID NO: 2827 - DNA, 129 bp, synthetic construct
  source 1..129: mol_type = other DNA
acgaaatcgagtatactgtcacagtgtgtatcgtcgagactcacgtcccggctgacacctcaaccttcatccaagcgagcgaggcgactatgcacccgaccgacctgaaattagctgttgacggtataa

SEQ ID NO: 2828 - DNA, 129 bp, synthetic construct; identical to SEQ ID NO: 2756
  source 1..129: mol_type = other DNA

SEQ ID NO: 2829 - DNA, 129 bp, synthetic construct
  source 1..129: mol_type = other DNA
acgacgatagctattatggaggagtggttgtgaagttgctaaccctggtcagagctttcgctccgaggtggtcgcttcgagttgcgggccgagttgttctcggtggccggctcgaagttgacaactcga

SEQ ID NO: 2830 - DNA, 117 bp, synthetic construct
  source 1..117: mol_type = other DNA
tagaaacactgtataatgtaatcagtatcatggagatcgttatgagcatcgtccacctgttaatcagcctctgggaggtattcagcgaaggtcgctgtccgagagttgacaacctgt

SEQ ID NO: 2831 - DNA, 117 bp, synthetic construct; identical to SEQ ID NO: 2757
  source 1..117: mol_type = other DNA

SEQ ID NO: 2832 - DNA, 120 bp, synthetic construct
  source 1..120: mol_type = other DNA
tagaaatgcaatatcatgtcagtataaacgtggagttccatatgatggaaatcgcggtctacgcgttgtctgcactgcgtctgtgctcggcgagcaattcggcgtggcttgacaacctgt

SEQ ID NO: 2833 - DNA, 111 bp, synthetic construct
  source 1..111: mol_type = other DNA
tagaaatgatatatgatgttatcaaggatggagactatacgatgataatcttacacctcgttgcaatgtgcttatcttggctctgccagagtaaatacattgacaaactgt

SEQ ID NO: 2834 - DNA, 111 bp, synthetic construct
  source 1..111: mol_type = other DNA
tagaaatgatgtataatgtaatctgcgatggagactatatgatgataatcgtacacctcatgacaatgttgttgtcttgcctcagcaagcgcaacggcattgacaatctgt

SEQ ID NO: 2835 - DNA, 135 bp, synthetic construct
  source 1..135: mol_type = other DNA
tataattgagcaggagttactaatgactactttgtgtacattagctgtctttgctttggttgtatcctcagcagactgcttgccaatctcaagaaagatttctctcgaattccttcagatgagcttgacaacaat

SEQ ID NO: 2836 - DNA, 117 bp, synthetic construct; identical to SEQ ID NO: 2757
  source 1..117: mol_type = other DNA

SEQ ID NO: 2837 - DNA, 117 bp, synthetic construct
  source 1..117: mol_type = other DNA
tagaaatgacgtatcatctcagtatagacatggaggcacgcatggcgcagctcgcagtctggttgctgtcatcgatttcggtctgcttgcgcggcacgattcgtgttgacaacctgt

SEQ ID NO: 2838 - DNA, 153 bp, synthetic construct
  source 1..153: mol_type = other DNA
ttgacaaacgcattaaacttaacatgctatactataggaggtagtatgattacaaactacttgataatgatattgttagtgttgaaaccttggattgccttatgggctaggttccttattacaatacttcttaacaaactgtttgacagttca

SEQ ID NO: 2839 - DNA, 132 bp, synthetic construct
  source 1..132: mol_type = other DNA
taggatcgacatataatgtcagcgtcacacttggagtatctatgaagataagtctccgtgggctgctggccgcattgctggtaatcgtaggatgttattcttccggaaccgccttggggcttgacagcttgt

SEQ ID NO: 2840 - DNA, 117 bp, synthetic construct; identical to SEQ ID NO: 2653
  source 1..117: mol_type = other DNA

SEQ ID NO: 2841 - DNA, 117 bp, synthetic construct; identical to SEQ ID NO: 2686
  source 1..117: mol_type = other DNA

SEQ ID NO: 2842 - DNA, 12 bp, synthetic construct
  source 1..12: mol_type = other DNA
tataattgaaag

SEQ ID NO: 2843 - DNA, 144 bp, synthetic construct
  source 1..144: mol_type = other DNA
tatatgaatacttcttaaatgcatacagacaaattctgttgaaaggtacagaactaatgccgtttggactgtcagagagcacactgagcgaaccaataaacttggtatacttattgctaggtacttatatattcactaacttaa

SEQ ID NO: 2844 - DNA, 114 bp, synthetic construct
  source 1..114: mol_type = other DNA
taggaatgacgtacaatgttcacatgctactggaggtatccttgcggaatcctgtcatcgctctgctatcaatcgtcctggcgatcacgctgccgggcggaattgacaacttgt

SEQ ID NO: 2845 - DNA, 135 bp, synthetic construct
  source 1..135: mol_type = other DNA
tcgacgagctggtctatactgctatccaagcgatgttcgcgtgggcgacttcgtgcaaccgcaacaagatgtcggaggtcaacatgaacctcgcgtttctcctggtggggatcgcattcggccttgacagcttca

SEQ ID NO: 2846 - DNA, 111 bp, synthetic construct
  source 1..111: mol_type = other DNA
tagaaatgatatataatgtaatctgcgatggagactatacaatggtaatcttacgcttcatgacaatgtgtttatcttggctctgcaaggataaatgcattgacaatctgt

SEQ ID NO: 2847 - DNA, 120 bp, synthetic construct; identical to SEQ ID NO: 2719
  source 1..120: mol_type = other DNA

SEQ ID NO: 2848 - DNA, 153 bp, synthetic construct
  source 1..153: mol_type = other DNA
ttgacaaacgcattaaacttaacatgctatactataggaggtagtatgattacaaaccacttgataatgatattgttagtgttgaaaccttggattgccttatgggctaggttccttattacaatacttcttaacaaactgtttgacagttca

SEQ ID NO: 2849 - DNA, 111 bp, synthetic construct
  source 1..111: mol_type = other DNA
tagaaatgatatataatgtaatctgcgatggagactatacaatggcaatcttacgcttcatgacaatgtgtttatcttggctctgcaaggataaaggcattgacaatctgt

SEQ ID NO: 2850 - DNA, 153 bp, synthetic construct
  source 1..153: mol_type = other DNA
ccgacgaagtctgttatactgtggtcatcgggataacgaaattcctgttacggaagatcatcccaaccaagcgccaggtgagtcagcagatcggaggttacacaatggcactactcgaagcgctgctcgcgattcttgggcttgacagtctta

SEQ ID NO: 2851 - DNA, 111 bp, synthetic construct
  source 1..111: mol_type = other DNA
tagaaatgatatgtaatgtaatctgtgatggagactatatgatgataatcttacacctcatggcaatgtgtttatcttggcaaagcaagaatcgagacattgaccatctgt

SEQ ID NO: 2852 - DNA, 111 bp, synthetic construct
  source 1..111: mol_type = other DNA
tagaaatgatatgtaatgtaatctgtgatggagactatatgatgataatcttacacctcatggcaatgtgtttatcttggcaaagcaagaatcgagacattgacaatctgt

SEQ ID NO: 2853 - DNA, 111 bp, synthetic construct
  source 1..111: mol_type = other DNA
tagaaatgatatgtaatgtaatctgtgatggagactatatgatgataatcttacacctcttggcaatgcgtttatcttggctaagcaagaatcgacatattgacaacctgt

SEQ ID NO: 2854 - DNA, 117 bp, synthetic construct; identical to SEQ ID NO: 2687
  source 1..117: mol_type = other DNA

SEQ ID NO: 2855 - DNA, 156 bp, synthetic construct
  source 1..156: mol_type = other DNA
ttgaccaacgcattaaacttaacatgctataatactactggagagagtatgatcacaaaccacttgataatgatattgttagtgctgaaaccatggagtgccttactcgctaggttccttactacaatactgcttaacaaactgcttgacagttca

SEQ ID NO: 2856 - DNA, 120 bp, synthetic construct
  source 1..120: mol_type = other DNA
tagaaatgcaatatcatgtcagtataaacttggaggtccgtatgacggaaatcgcggtctacgtgttgtctgcactgcgtctgtgctctacgagcaattcggcgtggcttgacaacctgt

SEQ ID NO: 2857 - DNA, 120 bp, synthetic construct
  source 1..120: mol_type = other DNA
tagcaatgatatataatgtctatatcacaaaggaggtatccatgcggattaccgtcgcaatgctcgcgtcaatcatgacaggctgccgtgaaggctgcctggaatggcttgacattctgt

SEQ ID NO: 2858 - DNA, 153 bp, synthetic construct
  source 1..153: mol_type = other DNA
tcgacgatgtctgttatactgtaattgtcgggattgcgaaatatctcattgagaaattcggcccgatcaagacgcagtgtcacaaattgtacggatataccctaatggaggattctatcgcacagattatgcaaatatgccttgacagtatta

SEQ ID NO: 2859 - DNA, 120 bp, synthetic construct; identical to SEQ ID NO: 2856
  source 1..120: mol_type = other DNA

SEQ ID NO: 2860 - DNA, 120 bp, synthetic construct
  source 1..120: mol_type = other DNA
tagaaatgcagtatcatggcagtatcatcgtagaggtccgtatgacggaaatcctgttctacgtgttgtccgcgttgcgtctcagctcatggagcggattcgcgtggcttgacaacctgt

SEQ ID NO: 2861 - DNA, 135 bp, synthetic construct
  source 1..135: mol_type = other DNA
tcgacgagctggtctatactgttatccaagcgatgttcgcgtgggcgacttcgtgcaaccgcaacaagatgtcggaggtcaacatgaacctcgcgtttctcctggtggggatcgcattcggtcttgacagcttca

SEQ ID NO: 2862 - DNA, 129 bp, synthetic construct
  source 1..129: mol_type = other DNA
tagacatgaattatgatgtctgtatcacagtggagattacaatgaattgcaaccttgccgactggatgacgttagttgccatggaacttatcgcattgtgcgacggtctaatggtacttgacatcttgt

SEQ ID NO: 2863 - DNA, 117 bp, synthetic construct
  source 1..117: mol_type = other DNA
tagaaacactgtataatgtaatcagtatcatggagaccgttatgagcatcatccacttgttaagcaatctctggtcgatttgtagcgaaggctactgcccaagagttgacaaactgt

SEQ ID NO: 2864 - DNA, 117 bp, synthetic construct
  source 1..117: mol_type = other DNA
tagaaacactgtataatgtaatcagcctaatggagatcgttatgagcatcgtccacctgttgttcaatctctgctcggcgtgttgcgaaactcgctggccgggactggacaaactgt

SEQ ID NO: 2865 - DNA, 126 bp, synthetic construct
  source 1..126: mol_type = other DNA
tagacatggtttactatgtcagtatcacagtggagatcacaatgacttgtaacctcatcaactggacgttatcaatacttaggcttgcatcagcgttgagctgtgctgccggtgttgacaacttgt

SEQ ID NO: 2866 - DNA, 114 bp, synthetic construct
  source 1..114: mol_type = other DNA
taggaatgacgtacaatgttcacatgctactggaggtatccttgcggaatcctgtcatcgctctgctatcaatcgtcctggcgatcacgctgccggtcggacttgacaacttgt

SEQ ID NO: 2867 - DNA, 120 bp, synthetic construct
  source 1..120: mol_type = other DNA
cagatatgatatatgctatcatcatcgcaggagtgttcgatatgaatctactaatcatctgcggctatgcaagtcgtctactcgccagtgttctggttcgtattctacttgacagcttgt

SEQ ID NO: 2868 - DNA, 153 bp, synthetic construct; identical to SEQ ID NO: 2848
  source 1..153: mol_type = other DNA

SEQ ID NO: 2869 - DNA, 120 bp, synthetic construct; identical to SEQ ID NO: 2719
  source 1..120: mol_type = other DNA

SEQ ID NO: 2870 - DNA, 135 bp, synthetic construct
  source 1..135: mol_type = other DNA
tataattagtatattgaattggttgattatgacgattggaggtatccaaatgccaagttattcagaagcgttatcgattgtaattagctgggtcagccttgtgattacaattgagataaagcttgacagaaattc

SEQ ID NO: 2871 - DNA, 120 bp, synthetic construct; identical to SEQ ID NO: 842
  source 1..120: mol_type = other DNA

SEQ ID NO: 2872 - DNA, 120 bp, synthetic construct; identical to SEQ ID NO: 2719
  source 1..120: mol_type = other DNA

SEQ ID NO: 2873 - DNA, 108 bp, synthetic construct
  source 1..108: mol_type = other DNA
tataatgaagtaagcacccagggccgaatcgcggagatcatgtcgatcgtcgcatcggtcctatcaatcgccaaattcctcatggaattataacagttgacaggagta

SEQ ID NO: 2874 - DNA, 120 bp, synthetic construct
  source 1..120: mol_type = other DNA
tagaaatgcaatatcatgtcagcatcaacgtagaggtccgtatgacggaaatcctgttctacgcgttgtcagctttgcgtctctgctcgtggagcggattcgcggcgcttgacaacctgt

SEQ ID NO: 2875 - DNA, 120 bp, synthetic construct; identical to SEQ ID NO: 2634
  source 1..120: mol_type = other DNA

SEQ ID NO: 2876 - DNA, 129 bp, synthetic construct
  source 1..129: mol_type = other DNA
tcgagataatggactatattggctgtatgaagaattgctcttcatgcaccgtgggcgtccagatacgcatggaggtcctgatggacatcgtagcaatactgctggcagctttcgggcttgacagcttca

SEQ ID NO: 2877 - DNA, 141 bp, synthetic construct
  source 1..141: mol_type = other DNA
tcgacgtagtcgtgtatgttatcatacagttggcaattatgtattgccggtatgctggcaaagcacgctggtggttaacaatcggagttccagttatggaaatctttatgaaagttcactcaggaaaccttgacagtgtaa

SEQ ID NO: 2878 - DNA, 117 bp, synthetic construct
  source 1..117: mol_type = other DNA
tagaaacactgtataatgtaacgagtatcatggagaccgttgtgagcatcatccacttgttggtcagcctctgggcggtgtgcagcgaagtgcgctatccggaagttgacaaactgt

SEQ ID NO: 2879 - DNA, 156 bp, synthetic construct
  source 1..156: mol_type = other DNA
ttagaaggaggcgcgcacatgataaccagcttaatattgttgaatatctgtataatcactacctataagttattccaaggcgtagatctgcgccgattagttgtcgaactgaatctagaatttatgaataaattcggcataacagcattgacaaca

SEQ ID NO: 2880 - DNA, 162 bp, synthetic construct
  source 1..162: mol_type = other DNA
tagaaatgatatataatgtaatctgcgatggagactatacaatggcaatcttacgcttcatgacaatgtgtttatcttggctctgcaaggataaaggcattgacaatctgttagaaatgatatataatgtaatctgcgatggagactatacaatggcaatct

SEQ ID NO: 2881 - DNA, 111 bp, synthetic construct
  source 1..111: mol_type = other DNA
tagaaatgatatataatgtaatctgcgatggagactatacgatgttaatcttacgcttcatgacgatgtgtttatcttggctctgcaaggataaatacattgacaatctgt

SEQ ID NO: 2882 - DNA, 117 bp, synthetic construct; identical to SEQ ID NO: 2637
  source 1..117: mol_type = other DNA

SEQ ID NO: 2883 - DNA, 111 bp, synthetic construct; identical to SEQ ID NO: 2643
  source 1..111: mol_type = other DNA

SEQ ID NO: 2884 - DNA, 129 bp, synthetic construct
  source 1..129: mol_type = other DNA
tagaaatgatttataatacttgtatcactctcacgatggaggtatccatgaagattctcgcatgcgtggtgttgtcaatattctcagtatacctcggaggcacgccaataattacgcttgacaacctgt

SEQ ID NO: 2885 - DNA, 132 bp, synthetic construct
  source 1..132: mol_type = other DNA
taggatcgacatataatgtcagcgtcacacttggagtatctatgaagataagtctccgtgggctgttggccgcattgctggtaatcgtaggatgttattcctccggaaccgccttggggcttgacagcttgt

SEQ ID NO: 2886 - DNA, 117 bp, synthetic construct
  source 1..117: mol_type = other DNA
taaacatagaatatgctatcaccatcacaataactctggaggtgcctatcaagacacttatcaaagcattgctgtcattctgctcaataatgttattgagtaggtttgacagcctgt

SEQ ID NO: 2887 - DNA, 117 bp, synthetic construct
  source 1..117: mol_type = other DNA
tagaaacactacataatgtgactagtgttatggagaccgtgatgagcgtcatccaagtgctgtataccgtctggtcggcgtgctgtgaagaacgctgcccatggcttgacaacctgt

SEQ ID NO: 2888 - DNA, 111 bp, synthetic construct
  source 1..111: mol_type = other DNA
tagaaatgatgtataatgtaatctgcgatggagattatatgatgataatcgtacacctcatgacaatgttgttgtcttggctcagcaagcgcaacggcattgacaatctgt

SEQ ID NO: 2889 - DNA, 111 bp, synthetic construct
  source 1..111: mol_type = other DNA
tagaaatgatttataatgtaatattcgatggagactatacgatgataatcttacacctcatggcaatgttgttttcttggcgaaccagagagcgatgcattgacaatctgt

SEQ ID NO: 2890 - DNA, 111 bp, synthetic construct; identical to SEQ ID NO: 2881
  source 1..111: mol_type = other DNA

SEQ ID NO: 2891 - DNA, 87 bp, synthetic construct
  source 1..87: mol_type = other DNA
tcaaccttctgacgatactcagtttgataattgagttagctttagattcaacgttgaagctaaagataacgtcagacttgacattaa

SEQ ID NO: 2892 - DNA, 123 bp, synthetic construct
  source 1..123: mol_type = other DNA
tagtctattatgtcatcctggggctttacgccttcggagcgcatgcggactacaaccgacgagagaccacattggatcaattactcattcagttattcgtcaacatttgccttgacagtttca

SEQ ID NO: 2893 - DNA, 120 bp, synthetic construct
  source 1..120: mol_type = other DNA
taacaatcacatatactatgtgtagcgtcgtggagaacaactgtatgctgcccttaccggtcgccctgtcattcaagataacatgtcatattgacatcattatattgcttgacatcctgt

SEQ ID NO: 2894 - DNA, 129 bp, synthetic construct
  source 1..129: mol_type = other DNA
aagcttcatgctctatgatgaaccgatgaatgcgaccatacacctaaaccttgcagtccagatgacaggaagattctttgctacatcaatgtttctgttggctctcgccgcaggaaaccttgacttggc

SEQ ID NO: 2895 - DNA, 120 bp, synthetic construct
  source 1..120: mol_type = other DNA
tagaaatgcaatatcatgtcagtatcgacttggagatccgtatgacggaaatcgcggtctatgtgttgtctgctctgcgtctatgctcttcgagcaattcggcgtggcttgacaacctgt

SEQ ID NO: 2896 - DNA, 117 bp, synthetic construct
  source 1..117: mol_type = other DNA
tagaaacactgtataatgtaatcagtatcatggagaccgttatgagcatcatccacttgttaatcagcctctgtgaggtgttcagcgaaagtagctgtccgagagttgacaaactgt

SEQ ID NO: 2897 - DNA, 129 bp, synthetic construct
  source 1..129: mol_type = other DNA
acaatataaattatgctatcactttaacaattactttggagacatctatgaagacgcttatccacatgatcttgtcactgtcattctgttcagtaagcttactgagcaggtttgacattgacatcttgt

SEQ ID NO: 2898 - DNA, 111 bp, synthetic construct
  source 1..111: mol_type = other DNA
tagaaatgatgtataatgtaatctgcgatggagactatttgatgataatcgtacacctcatgacaatgttgttgtcttggctcagcaagcgcaacggcattgacaatctgt

SEQ ID NO: 2899 - DNA, 156 bp, synthetic construct
  source 1..156: mol_type = other DNA
gagaactcttaaaacctatgttatcatcatctcaaggaggcaataataaccgtgattagtttactcaatgtagaagatccatgcttcgcagtctcggttctccacatctggtggtttagggagtttattaacgttcataaacttgctaaacctaga

SEQ ID NO: 2900 - DNA, 117 bp, synthetic construct; identical to SEQ ID NO: 2878
  source 1..117: mol_type = other DNA

SEQ ID NO: 2901 - DNA, 111 bp, synthetic construct
  source 1..111: mol_type = other DNA
tagaaatgatttataatgtaatattcgatggagactatacgatgataatcttacacctgatgacaatgttgattccttggcgtaccagagaacgatgcattgacaatctgt

SEQ ID NO: 2902 - DNA, 129 bp, synthetic construct
  source 1..129: mol_type = other DNA
acgaaatcgagtatactgtaacagtggcgatcatcgagacttgcgtctggaccgatcatcccatcttcattcaagcgagcgaggcgacaatgcgcgacaccaacgagaaattagctgttgacggtataa

SEQ ID NO: 2903 - DNA, 132 bp, synthetic construct
  source 1..132: mol_type = other DNA
acgacataacgttgtatactatcggcacggcacgaagctcgtgtgcagtccgtcgctgccggtatctcatggagatcataatggacctcgtcactctgatactgctggctcacttcgggcttgacagtttca

SEQ ID NO: 2904 - DNA, 117 bp, synthetic construct
  source 1..117: mol_type = other DNA
taaacatagattatgctatcaccataacaataactctggaggtacctatcaagacacttatccaagtattgctgtcattctgctcaataagcttattgagtaggtttgacagcctgt

SEQ ID NO: 2905 - DNA, 120 bp, synthetic construct
  source 1..120: mol_type = other DNA
cagatatgatttacaatatcgttgtgtcaggagtgttcgacatgagtctagtaagcacctgccatagcttcaagcagcttatcttccagttactggttcagatagcacttgacagcttgt

SEQ ID NO: 2906 - DNA, 117 bp, synthetic construct; identical to SEQ ID NO: 2757
  source 1..117: mol_type = other DNA

SEQ ID NO: 2907 - DNA, 129 bp, synthetic construct
  source 1..129: mol_type = other DNA
acgacatagcgtatactgtggtgagctggctgatcagccggcgacaccaggtgaccgcaacgacgaaaggatacttacaggtgattataaatatcgcgctcgggctgctggtcggccttgacagtgata

SEQ ID NO: 2908 - DNA, 114 bp, synthetic construct; identical to SEQ ID NO: 2844
  source 1..114: mol_type = other DNA

SEQ ID NO: 2909 - DNA, 144 bp, synthetic construct
  source 1..144: mol_type = other DNA
tcgacgtagtcgtgtactgtctagtacagatcgcccgcatgtgctggcgaccgtgcagccgaccggcgtccaacctggcaataggagcccaactcatggaactcgcactttgcaccgaattggccacgggccttgacagtgtaa

SEQ ID NO: 2910 - DNA, 105 bp, synthetic construct
  source 1..105: mol_type = other DNA
taacaatgacgtataatgtcaatatcactgtagaggtatccatgcggacactcatagctacgctgtcatgcttgacgaattgcttcggttggcttgacatcctgt

SEQ ID NO: 2911 - DNA, 117 bp, synthetic construct
  source 1..117: mol_type = other DNA
tagaagcactgtataatgtaatcagcttaatggagaccgttatgagcatcgtccacctgttgttcagtctctggtcggcgtgttgcgaagctcgctggcccggactggacaaactgt

SEQ ID NO: 2912 - DNA, 114 bp, synthetic construct; identical to SEQ ID NO: 2739
  source 1..114: mol_type = other DNA

SEQ ID NO: 2913 - DNA, 120 bp, synthetic construct; identical to SEQ ID NO: 2860
  source 1..120: mol_type = other DNA

SEQ ID NO: 2914 - DNA, 117 bp, synthetic construct; identical to SEQ ID NO: 2658
  source 1..117: mol_type = other DNA

SEQ ID NO: 2915 - DNA, 141 bp, synthetic construct; identical to SEQ ID NO: 2877
  source 1..141: mol_type = other DNA

SEQ ID NO: 2916 - DNA, 120 bp, synthetic construct; identical to SEQ ID NO: 2719
  source 1..120: mol_type = other DNA

SEQ ID NO: 2917 - DNA, 117 bp, synthetic construct
  source 1..117: mol_type = other DNA
tagaaacactgtataatgtaatcagcttgacggagaccataatgagcatcgtccacctgttggtcagcctctggtcggtgtgcagcgaaggtcgctggccgggagttgacaaactgt

SEQ ID NO: 2918 - DNA, 132 bp, synthetic construct
  source 1..132: mol_type = other DNA
taggatcgacgtataatgtcagcgtcacacttggagtacctatgagaataagtatccgagcgctggtgtctgcactgctggtcaccctgggttatttcacctgtggtgccgcgatgggacttgacagcttgt

SEQ ID NO: 2919 - DNA, 120 bp, synthetic construct
  source 1..120: mol_type = other DNA
tagagatgatatataatgtcatcagcatcttggagagcgtaaccgttatgattcgattagtctcgtcaatccatgcattggcgaccattgtgggagccatggctggtattgacaacctgt

SEQ ID NO: 2920 - DNA, 144 bp, synthetic construct
  source 1..144: mol_type = other DNA
tcgacgtggtcgtgtatactgtgacgcacctggcaatgtggtattgccggattgccgcaaagccgcccgcgtggctggcgaaaggagcccgaattatggaactcgcaatctgcaccgccccggaagttggccttgacagtttaa

SEQ ID NO: 2921 - DNA, 144 bp, synthetic construct
  source 1..144: mol_type = other DNA
ttgactaacgcataaaacttaacatgctatactattggaggaagtatgatgaccaactgtgtagtgatattgttgaaactaatcgtagcctttctggctcgcttcgttattacaatatctcttaacaaactgctggacagttca

SEQ ID NO: 2922 - DNA, 132 bp, synthetic construct
  source 1..132: mol_type = other DNA
tcgacgtaatcagttacactatcagcgtggcaagcctcgcatggcgtacgctgggaagccggaacacgagggaacaagtgagtaacctgctcgaactgctcagctgtcttgcgaattgccttgacagttaca

SEQ ID NO: 2923 - DNA, 144 bp, synthetic construct
  source 1..144: mol_type = other DNA
ttgactaacgcataaaacttaacatgctatactattggaggaagtatgatgaccaactgtgtagtgatattgttgaaactaatcgtagcctttctagctcgcttcgttattacaatatctcttaacaaactgctggacagttca

SEQ ID NO: 2924 - DNA, 99 bp, synthetic construct
  source 1..99: mol_type = other DNA
tagcaatgtcgtacagtatcctggaggtgtccatgaagttgaacatccaagtagagctgtcaagtttgaccggcgaggccgggtggcttgacatcctgt

SEQ ID NO: 2925 - DNA, 123 bp, synthetic construct
  source 1..123: mol_type = other DNA
tagaaatgatttataatataatctgcgaggagaattatatgattatgataaccttattaatcttacgcttcatgacgatgtgcgtgttcttccgacggaagaacaaatacattgacaatctgt

SEQ ID NO: 2926 - DNA, 126 bp, synthetic construct
  source 1..126: mol_type = other DNA
tagaaatgatttataatataatctgcgaggagaattatgtgactataactgtgataatcttaatcttacgcttcatgacaacgtgcgtgttcttccagcggaagaacaggtacattgacaatctgt

SEQ ID NO: 2927 - DNA, 132 bp, synthetic construct; identical to SEQ ID NO: 2770
  source 1..132: mol_type = other DNA

SEQ ID NO: 2928 - DNA, 144 bp, synthetic construct
  source 1..144: mol_type = other DNA
taaggatgtgttataatcaatcaactacaactattctaaacttaggatcatttatgatacttatgaacataatgaaattaatatttagtctctggtcattagtcaaaacaatttcagaaatagtttcaacacttgacattctgt

SEQ ID NO: 2929 - DNA, 132 bp, synthetic construct
  source 1..132: mol_type = other DNA
cacatatgatgtataatatcattgcgtcacagggaactatcggcatgtttcagctaatcgttgtgtgcggctgctcaaggcatgtggtcaccagttattgttgctggttccaattgctacttgacagcttgt

SEQ ID NO: 2930 - DNA, 132 bp, synthetic construct
  source 1..132: mol_type = other DNA
cacatatgatgtataatatcattgcgtcacagggaactatcggcatgtttcagctaatcgttatgtgcggctgctcaaggcatgtggtcaccagttatggttgctggttccaattgctacttgacagcttgt

SEQ ID NO: 2931 - DNA, 129 bp, synthetic construct
  source 1..129: mol_type = other DNA
tcgagataatggactatattggctgtatgaagaattgctcttcatgcaccgtgggcgtccagatacgcatggaggtcctgatggacatcatagcaatactgctggcagctttcgggcttgacagcttca

SEQ ID NO: 2932 - DNA, 144 bp, synthetic construct
  source 1..144: mol_type = other DNA
tcgacgtggtcgcgtatgctgtcatgcagctggcagtgtggtgctgccgaactgaccgcagccggcccgcgtggctggcgagaggagcccgaatgatcgaactcgcgtcctgcactgacctcgggacaagccttgacagtataa

SEQ ID NO: 2933 - DNA, 129 bp, synthetic construct
  source 1..129: mol_type = other DNA
taggagagacatataatgtccgcgttacagtgaggttcaacatgagtatcacccgtttgctggtcgccttcaccatgatcatcataagtattactactggtatgacattctgggggcttgacagcctgt

SEQ ID NO: 2934 - DNA, 141 bp, synthetic construct
  source 1..141: mol_type = other DNA
taaatatatattataataatcaatcaactattataactcacaaggaatctaatatgacaataatcattatcaaattctttattagtttatgttcagtagctgaaacgctttatgaaatgttatcaactattgacatactgt

SEQ ID NO: 2935 - DNA, 141 bp, synthetic construct; identical to SEQ ID NO: 2934
  source 1..141: mol_type = other DNA

SEQ ID NO: 2936 - DNA, 141 bp, synthetic construct; identical to SEQ ID NO: 2934
  source 1..141: mol_type = other DNA

SEQ ID NO: 2937 - DNA, 117 bp, synthetic construct; identical to SEQ ID NO: 2653
  source 1..117: mol_type = other DNA

SEQ ID NO: 2938 - DNA, 117 bp, synthetic construct; identical to SEQ ID NO: 2653
  source 1..117: mol_type = other DNA

SEQ ID NO: 2939 - DNA, 135 bp, synthetic construct
  source 1..135: mol_type = other DNA
tatacttagtatactgaattggttgcttatgacgaatggaggtttccaaatgccaagttacttagaagcattatcgattgtacttagctcggtaaatcttaccgttacaattgagataaggcttgcaagaagttc

SEQ ID NO: 2940 - DNA, 141 bp, synthetic construct
  source 1..141: mol_type = other DNA
taaagatgaattataatcaaacagatataattaccaaggagttgaacatgacaatagtctatgccatgcgtttcctgttaataatactgtcatggtctatggcaactttcgaagcctataatgaccttgacagtctgctga

SEQ ID NO: 2941 - DNA, 120 bp, synthetic construct
  source 1..120: mol_type = other DNA
cagatatgatatatgataccatcatcgcaggagtgttcgacatgagtctactagccatctgcggccatgcaagtcgtctgctagccagtgtactggtgagcgttctacttgacagcttgt

SEQ ID NO: 2942 - DNA, 120 bp, synthetic construct; identical to SEQ ID NO: 2719
  source 1..120: mol_type = other DNA

SEQ ID NO: 2943 - DNA, 120 bp, synthetic construct; identical to SEQ ID NO: 2719
  source 1..120: mol_type = other DNA

SEQ ID NO: 2944 - DNA, 141 bp, synthetic construct
  source 1..141: mol_type = other DNA
taaagatgaattataatcaaacagatataatcaccaaggagttcggtatgacaatagtctatgccatgcgtttcctgttggtaatactgtcatggtctatggcaactttcgaagcctataatgaccttgacagtctgctga

SEQ ID NO: 2945 - DNA, 129 bp, synthetic construct; identical to SEQ ID NO: 2680
  source 1..129: mol_type = other DNA

SEQ ID NO: 2946 - DNA, 144 bp, synthetic construct
  source 1..144: mol_type = other DNA
tcgacgtggtcgtgtatactgtgaagcacctggcaatgtggtattgccaaattgccgcaaagccgcccgcgtggctggcgagaggagcccgaatgatcgaactcgcgtcatgcaccggctgcgaaactggccttgacagtttaa

SEQ ID NO: 2947 - DNA, 144 bp, synthetic construct
  source 1..144: mol_type = other DNA
tcgacgtggtcgtgtatactgtgaagcacctggcaatgtggtattgccggattgccgcaaagccgcccgcgtggctggcgagaggagcccgaatgatcgaactcgcgtcttgcaccggctgcgaaactggccttgacagtttaa

SEQ ID NO: 2948 - DNA, 144 bp, synthetic construct
  source 1..144: mol_type = other DNA
tcgacgtggtcgtgtatactgtgaagcaactggcaatgtggtattgccggattgccgcaaagccgcccgcgtggctggcgagaggagcccgaatgatcgaactcgcgatctgcaccggcagcgaaactggccttgacagtttaa

SEQ ID NO: 2949 - DNA, 144 bp, synthetic construct
  source 1..144: mol_type = other DNA
tcgacgtggtcgtgtatactgtgaagcagctggcaatgtggtattgccggactgccgcaaagccgcccgcgtggctggcgagaggagcccaaatgctggaactcacgatctgcaccggctgcgaaactggccttgacagtttaa

SEQ ID NO: 2950 - DNA, 123 bp, synthetic construct
  source 1..123: mol_type = other DNA
taacaatcacgtatactaatagtaatcggacaactatctcagaggatcaccgtatgttcagcattccaatatcaatagcgttcaagtttcgcttgaaatatcaagttctgcttgacatcctgt

SEQ ID NO: 2951 - DNA, 219 bp, synthetic construct
  source 1..219: mol_type = other DNA
tataataaatataactacaactatggaggtatttaatatgataattcaacaattctgcttctttcttcctttattggttgaaataatacagctgaacagcattcttacgaatgtattcactggagttatcgcgtgcattgcacaagaaatgattgcattagcagtcgaaaatacaataatgtatattcgaaagaatgctgttcagctcttgacaataat

SEQ ID NO: 2952 - DNA, 135 bp, synthetic construct
  source 1..135: mol_type = other DNA
ccaacgtgcggtgttatgctgacctcgcggaggaggtcatcgtgaaagtgctcagcaacatcgtcgctcggctcggcatgtgcgtcatccgcgcatgcgtcgaagccgtcgcgaactggtcgcttgacaccgtca

SEQ ID NO: 2953 - DNA, 120 bp, synthetic construct
  source 1..120: mol_type = other DNA
caggtatgatgtataatatcatagtgtcaggagtgttcgacgtgagtctattaaccgtctgctgtagcttcaagaagcgcctgttccagttcatggttcaggtagcccttgacagcttgt

SEQ ID NO: 2954 - DNA, 111 bp, synthetic construct
  source 1..111: mol_type = other DNA
tagaaatgatatataatgtaatctgcgatggagactatacaatggtaatcttacgcttcatgacgatgtgtttatcttggttctgcaaggataaatacattgacaatctgt

SEQ ID NO: 2955 - DNA, 144 bp, synthetic construct
  source 1..144: mol_type = other DNA
ttgactaacgcataaaacttaacatgctatactattggaggaagtatgatgaccaactgtgtggtgatattgttgaaactaatcgtagcctttctggctcgcttcgttattacaatatctcttaacaaactgctggacagttca

SEQ ID NO: 2956 - DNA, 144 bp, synthetic construct; identical to SEQ ID NO: 2955
  source 1..144: mol_type = other DNA

SEQ ID NO: 2957 - DNA, 117 bp, synthetic construct
  source 1..117: mol_type = other DNA
tagaaacactgtataatgtaatcagcttaatggagaccgttatgagcatcgtccacctgttggtcagcctctggtcggtttgcaacgaaggtcgctggccggaagtcgacaaactgt

SEQ ID NO: 2958 - DNA, 120 bp, synthetic construct; identical to SEQ ID NO: 2719
  source 1..120: mol_type = other DNA

SEQ ID NO: 2959 - DNA, 129 bp, synthetic construct
  source 1..129: mol_type = other DNA
aaatgccatgttgtataatgaacacatcaacctcagagtcaccatgaacatccctgtccagatgaatctgtggtctttgctcacagtagagttggcgacggcggtggccggagccaaactttactttgc

SEQ ID NO: 2960 - DNA, 138 bp, synthetic construct
  source 1..138: mol_type = other DNA
cacatatgatctataatatcaacgacccagtttcacaaggaggactgaatatgcctattgttataaatactattatgtgtagtattgccagttgtgcgattgccaagttcttggaaatcgtactgcttgacagcatgt

SEQ ID NO: 2961 - DNA, 111 bp, synthetic construct
  source 1..111: mol_type = other DNA
tagaaatgatatataatgtaatctgcgatggagactatacaatggtaatcttacgcttcatgacaatgtgtttatcttggctctgcaaggataaagtcattgacaatctgt

SEQ ID NO: 2962 - DNA, 141 bp, synthetic construct
  source 1..141: mol_type = other DNA
aacatttagtatataatcgaattatatcgactgatatagggggtgaatttaccgtgctcagcgagttatcagcatggatagtggtggtgctatgcaatatagcgttgaaccatctcagtgattatttgcttgacaaggtca

SEQ ID NO: 2963 - DNA, 129 bp, synthetic construct
  source 1..129: mol_type = other DNA
tcgagataatggactatattggctgtatgaagaattgctcttcatgcaccgtcggcgtccaggtacacatggaggtccttgtggacatcatagcgatactgctggcaactttcgggcttgacagcttca

SEQ ID NO: 2964 - DNA, 150 bp, synthetic construct
  source 1..150: mol_type = other DNA
taaaacgatacactataattaccatgaggaggcaatcaaggtgctgatatggctgtctggcgctccagaagcgtttctagtactcgcaattctggtgatcaccgacgagcttggcgaggtgataaatatttatcaacttgacaagcgaga

SEQ ID NO: 2965 - DNA, 150 bp, synthetic construct
  source 1..150: mol_type = other DNA
taaaacactcaattataattacattaaggtggtaattacaactgtgataagtttgactgacttgccagacctgcaactactgttactgtatctagaaatcatatggcagcttggtgaggttcttaacgttaagaaacttgccaagcatga

SEQ ID NO: 2966 - DNA, 126 bp, synthetic construct
  source 1..126: mol_type = other DNA
tagacatggagtatcatgtcttggtgcagcctgaaggaggtcacattactatgaatgcaatcatcattctcggctggcggatggcaagtatcctgctcggaataaccgaagggcttgacatcctgc

SEQ ID NO: 2967 - DNA, 129 bp, synthetic construct
  source 1..129: mol_type = other DNA
tcgagattatggactatagtagctgcgtgaagatattctcttcatgcgccttgattgtccaatttcgtgcggaggtccgaatggacatctttacactactgctggcaaccttcgggcttgacagcttca

SEQ ID NO: 2968 - DNA, 129 bp, synthetic construct; identical to SEQ ID NO: 2967
  source 1..129: mol_type = other DNA

SEQ ID NO: 2969 - DNA, 129 bp, synthetic construct
  source 1..129: mol_type = other DNA
tcgagattatggactatagtagctgcgtgaagatattctcttcatgcgccttgattgtccaatttcatgcggaggtccgaatggacatctttacactactgctggcaaccttcgggcttgacagcttca

SEQ ID NO: 2970 - DNA, 129 bp, synthetic construct
  source 1..129: mol_type = other DNA
tcgagattatggactatagtagctgcgtgaagatattctcttcatgcgccttgattgtccagtttcgtgcggaggtccgaatggacatctttacaatactgctggcaaccttcgggcttgacagcttca

SEQ ID NO: 2971 - DNA, 150 bp, synthetic construct; identical to SEQ ID NO: 2773
  source 1..150: mol_type = other DNA

SEQ ID NO: 2972 - DNA, 117 bp, synthetic construct
  source 1..117: mol_type = other DNA
tagaaacactgtataatgtaatcagcgtgatggagaccgttatgagtatcgtccacctgttagtcagcctctggtcggtgttcagcgaaggtcgctggccgggagttgccaaactgt

SEQ ID NO: 2973 - DNA, 117 bp, synthetic construct
  source 1..117: mol_type = other DNA
tagaaacactgtataatgtaatcaggatcatggaggccgttatgagcatcgtccacttgttattcagcttctggtggcaataccgcgagggttgctacgagagagttgacaaactgt

SEQ ID NO: 2974 - DNA, 99 bp, synthetic construct
  source 1..99: mol_type = other DNA
tagcaatgtcgtacagttacctagagacaaccatgaggctgagattccaagttcagtggtcaagtttgcccggcatggccggatggcttgacatcctgt

SEQ ID NO: 2975 - DNA, 120 bp, synthetic construct
  source 1..120: mol_type = other DNA
tagatatgagttacactttaactattactttggaggttcctgtgtggataccgttccgtatcgtctcgtcactctggatggcggctcttgtgagcgcatcattcagctttgacgagctgt

SEQ ID NO: 2976 - DNA, 144 bp, synthetic construct; identical to SEQ ID NO: 2955
  source 1..144: mol_type = other DNA

SEQ ID NO: 2977 - DNA, 153 bp, synthetic construct
  source 1..153: mol_type = other DNA
ttgacaaacgcattaaacttaacatgctatactattggagctagtatgatcacaaaccacttgctaatgatactgttagtgttgaaaccatggattgccttaatggctaggttcattattacaatacttcttaacaaactgcttgacagttca

SEQ ID NO: 2978 - DNA, 162 bp, synthetic construct
  source 1..162: mol_type = other DNA
ttaacttaataaccacaactacaatgaaatgggaatcaattgtaactgctttagtgttctctgtccggctcagcctttgtttcggcgaactgaatgagcttctgaacatagttctgggtgctggtaacgttaccggcaccagaacggttgtcccgattctaa

SEQ ID NO: 2979 - DNA, 120 bp, synthetic construct
  source 1..120: mol_type = other DNA
cagatatgatatatgctatcatcatcgcaggagtgttcgatatgaatctactagtcatctgcggctatgcaagtcgtctgctcgccagtattctggttcgtattctacttgacagcttgt

SEQ ID NO: 2980 - DNA, 144 bp, synthetic construct
  source 1..144: mol_type = other DNA
tcgacgtggtcgtgtacactgtagcgcacctggcagcgtggtgttgccgggttgccgcaaagccgcccgcgtggctggcgagaggagcccaaacgatggaactcgcgatctgcaccggcccggaagctggccttgacagtttaa

SEQ ID NO: 2981 - DNA, 114 bp, synthetic construct
  source 1..114: mol_type = other DNA
tagaaatgtcgtaccatgctcacatgcaactggaggtgtccttgcggaatcccgtcgtcactctgttatcacttgtcctggcttggctgcagctgggcgaagttgacaacttgt

SEQ ID NO: 2982 - DNA, 129 bp, synthetic construct
  source 1..129: mol_type = other DNA
tagagatgatttattatcagtcaaccagagaggtcactatgacaaattatgccattcgtttcctgttgatagtcgtgtcattgctttacgcgggtctagaggcctgcgtagaacttgacagtttactga

SEQ ID NO: 2983 - DNA, 135 bp, synthetic construct
  source 1..135: mol_type = other DNA
tataatcagtatattaaattggttgtttatgacgattggaggtatccaaatgccaagttattcagaagcgttatcgattgtaatcgactggataagtattatgattacaattgagataaagcttgacagaaattc

SEQ ID NO: 2984 - DNA, 147 bp, synthetic construct
  source 1..147: mol_type = other DNA
ttgactaacgcataaaacttaacatgctatactattggaggtagtatgatgaccaacaactatgtagtgatattattgcaacaaatcgtagccagtgtggctcgctttgttattataacttctctaaatctactgctggacagttca

SEQ ID NO: 2985 - DNA, 120 bp, synthetic construct; identical to SEQ ID NO: 835
  source 1..120: mol_type = other DNA

SEQ ID NO: 2986 - DNA, 120 bp, synthetic construct; identical to SEQ ID NO: 835
  source 1..120: mol_type = other DNA

SEQ ID NO: 2987 - DNA, 120 bp, synthetic construct; identical to SEQ ID NO: 2596
  source 1..120: mol_type = other DNA

SEQ ID NO: 2988 - DNA, 120 bp, synthetic construct; identical to SEQ ID NO: 835
  source 1..120: mol_type = other DNA

SEQ ID NO: 2989 - DNA, 120 bp, synthetic construct; identical to SEQ ID NO: 2600
  source 1..120: mol_type = other DNA

SEQ ID NO: 2990 - DNA, 132 bp, synthetic construct; identical to SEQ ID NO: 844
  source 1..132: mol_type = other DNA

SEQ ID NO: 2991 - DNA, 120 bp, synthetic construct; identical to SEQ ID NO: 2603
  source 1..120: mol_type = other DNA

SEQ ID NO: 2992 - DNA, 132 bp, synthetic construct; identical to SEQ ID NO: 2605
  source 1..132: mol_type = other DNA

SEQ ID NO: 2993 - DNA, 132 bp, synthetic construct; identical to SEQ ID NO: 844
  source 1..132: mol_type = other DNA

SEQ ID NO: 2994 - DNA, 120 bp, synthetic construct; identical to SEQ ID NO: 2607
  source 1..120: mol_type = other DNA

SEQ ID NO: 2995 - DNA, 120 bp, synthetic construct; identical to SEQ ID NO: 2612
  source 1..120: mol_type = other DNA

SEQ ID NO: 2996 - DNA, 120 bp, synthetic construct; identical to SEQ ID NO: 2603
  source 1..120: mol_type = other DNA

SEQ ID NO: 2997 - DNA, 120 bp, synthetic construct; identical to SEQ ID NO: 2603
  source 1..120: mol_type = other DNA

SEQ ID NO: 2998 - DNA, 120 bp, synthetic construct; identical to SEQ ID NO: 2615
  source 1..120: mol_type = other DNA

SEQ ID NO: 2999 - DNA, 120 bp, synthetic construct; identical to SEQ ID NO: 2616
  source 1..120: mol_type = other DNA

SEQ ID NO: 3000 - DNA, 120 bp, synthetic construct; identical to SEQ ID NO: 837
  source 1..120: mol_type = other DNA

SEQ ID NO: 3001 - DNA, 120 bp, synthetic construct; identical to SEQ ID NO: 2620
  source 1..120: mol_type = other DNA

SEQ ID NO: 3002 - DNA, 120 bp, synthetic construct; identical to SEQ ID NO: 2600
  source 1..120: mol_type = other DNA

SEQ ID NO: 3003 - DNA, 120 bp, synthetic construct; identical to SEQ ID NO: 2600
  source 1..120: mol_type = other DNA

SEQ ID NO: 3004 - DNA, 120 bp, synthetic construct; identical to SEQ ID NO: 835
  source 1..120: mol_type = other DNA

SEQ ID NO: 3005 - DNA, 120 bp, synthetic construct; identical to SEQ ID NO: 835
  source 1..120: mol_type = other DNA

SEQ ID NO: 3006 - DNA, 120 bp, synthetic construct; identical to SEQ ID NO: 2615
  source 1..120: mol_type = other DNA

SEQ ID NO: 3007 - DNA, 120 bp, synthetic construct; identical to SEQ ID NO: 835
  source 1..120: mol_type = other DNA

SEQ ID NO: 3008 - DNA, 120 bp, synthetic construct; identical to SEQ ID NO: 842
  source 1..120: mol_type = other DNA

SEQ ID NO: 3009 - DNA, 120 bp, synthetic construct; identical to SEQ ID NO: 837
  source 1..120: mol_type = other DNA

SEQ ID NO: 3010 - DNA, 120 bp, synthetic construct; identical to SEQ ID NO: 837
  source 1..120: mol_type = other DNA

SEQ ID NO: 3011 - DNA, 120 bp, synthetic construct; identical to SEQ ID NO: 837
  source 1..120: mol_type = other DNA

SEQ ID NO: 3012 - DNA, 120 bp, synthetic construct; identical to SEQ ID NO: 2615
  source 1..120: mol_type = other DNA

SEQ ID NO: 3013 - DNA, 120 bp, synthetic construct; identical to SEQ ID NO: 2607
  source 1..120: mol_type = other DNA

SEQ ID NO: 3014 - DNA, 120 bp, synthetic construct; identical to SEQ ID NO: 2612
  source 1..120: mol_type = other DNA

SEQ ID NO: 3015 - DNA, 120 bp, synthetic construct; identical to SEQ ID NO: 2612
  source 1..120: mol_type = other DNA

SEQ ID NO: 3016 - DNA, 132 bp, synthetic construct; identical to SEQ ID NO: 2628
  source 1..132: mol_type = other DNA

SEQ ID NO: 3017 - DNA, 120 bp, synthetic construct; identical to SEQ ID NO: 837
  source 1..120: mol_type = other DNA

SEQ ID NO: 3018 - DNA, 120 bp, synthetic construct; identical to SEQ ID NO: 837
  source 1..120: mol_type = other DNA

SEQ ID NO: 3019 - DNA, 120 bp, synthetic construct; identical to SEQ ID NO: 837
  source 1..120: mol_type = other DNA

SEQ ID NO: 3020 - DNA, 111 bp, synthetic construct; identical to SEQ ID NO: 2639
  source 1..111: mol_type = other DNA

SEQ ID NO: 3021 - DNA, 111 bp, synthetic construct; identical to SEQ ID NO: 2639
  source 1..111: mol_type = other DNA

SEQ ID NO: 3022 - DNA, 117 bp, synthetic construct; identical to SEQ ID NO: 2646
  source 1..117: mol_type = other DNA

SEQ ID NO: 3023 - DNA, 111 bp, synthetic construct; identical to SEQ ID NO: 2641
  source 1..111: mol_type = other DNA

SEQ ID NO: 3024 - DNA, 117 bp, synthetic construct; identical to SEQ ID NO: 2637
  source 1..117: mol_type = other DNA

SEQ ID NO: 3025 - DNA, 117 bp, synthetic construct; identical to SEQ ID NO: 2637
  source 1..117: mol_type = other DNA

SEQ ID NO: 3026 - DNA, 117 bp, synthetic construct; identical to SEQ ID NO: 2646
  source 1..117: mol_type = other DNA

SEQ ID NO: 3027 - DNA, 117 bp, synthetic construct; identical to SEQ ID NO: 2655
  source 1..117: mol_type = other DNA

SEQ ID NO: 3028 - DNA, 117 bp, synthetic construct; identical to SEQ ID NO: 2655
  source 1..117: mol_type = other DNA

SEQ ID NO: 3029 - DNA, 117 bp, synthetic construct; identical to SEQ ID NO: 2655
  source 1..117: mol_type = other DNA

SEQ ID NO: 3030 - DNA, 117 bp, synthetic construct; identical to SEQ ID NO: 2655
  source 1..117: mol_type = other DNA

SEQ ID NO: 3031 - DNA, 117 bp, synthetic construct; identical to SEQ ID NO: 2637
  source 1..117: mol_type = other DNA

SEQ ID NO: 3032 - DNA, 111 bp, synthetic construct; identical to SEQ ID NO: 2656
  source 1..111: mol_type = other DNA

SEQ ID NO: 3033 - DNA, 120 bp, synthetic construct; identical to SEQ ID NO: 2663
  source 1..120: mol_type = other DNA

SEQ ID NO: 3034 - DNA, 132 bp, synthetic construct; identical to SEQ ID NO: 2668
  source 1..132: mol_type = other DNA

SEQ ID NO: 3035 - DNA, 132 bp, synthetic construct; identical to SEQ ID NO: 2668
  source 1..132: mol_type = other DNA

SEQ ID NO: 3036 - DNA, 117 bp, synthetic construct; identical to SEQ ID NO: 2686
  source 1..117: mol_type = other DNA

SEQ ID NO: 3037 - DNA, 129 bp, synthetic construct; identical to SEQ ID NO: 2689
  source 1..129: mol_type = other DNA

SEQ ID NO: 3038 - DNA, 114 bp, synthetic construct; identical to SEQ ID NO: 2690
  source 1..114: mol_type = other DNA

SEQ ID NO: 3039 - DNA, 120 bp, synthetic construct; identical to SEQ ID NO: 2691
  source 1..120: mol_type = other DNA

SEQ ID NO: 3040 - DNA, 120 bp, synthetic construct; identical to SEQ ID NO: 837
  source 1..120: mol_type = other DNA

SEQ ID NO: 3041 - DNA, 120 bp, synthetic construct; identical to SEQ ID NO: 837
  source 1..120: mol_type = other DNA

SEQ ID NO: 3042 - DNA, 120 bp, synthetic construct; identical to SEQ ID NO: 2695
  source 1..120: mol_type = other DNA

SEQ ID NO: 3043 - DNA, 120 bp, synthetic construct; identical to SEQ ID NO: 2695
  source 1..120: mol_type = other DNA

SEQ ID NO: 3044 - DNA, 120 bp, synthetic construct; identical to SEQ ID NO: 2695
  source 1..120: mol_type = other DNA

SEQ ID NO: 3045 - DNA, 120 bp, synthetic construct; identical to SEQ ID NO: 2696
  source 1..120: mol_type = other DNA

SEQ ID NO: 3046 - DNA, 132 bp, synthetic construct; identical to SEQ ID NO: 2703
  source 1..132: mol_type = other DNA

SEQ ID NO: 3047 - DNA, 132 bp, synthetic construct; identical to SEQ ID NO: 2668
  source 1..132: mol_type = other DNA

SEQ ID NO: 3048 - DNA, 132 bp, synthetic construct; identical to SEQ ID NO: 2668
  source 1..132: mol_type = other DNA

SEQ ID NO: 3049 - DNA, 132 bp, synthetic construct; identical to SEQ ID NO: 2628
  source 1..132: mol_type = other DNA

SEQ ID NO: 3050 - DNA, 132 bp, synthetic construct; identical to SEQ ID NO: 2709
  source 1..132: mol_type = other DNA

SEQ ID NO: 3051 - DNA, 132 bp, synthetic construct; identical to SEQ ID NO: 2628
  source 1..132: mol_type = other DNA

SEQ ID NO: 3052 - DNA, 135 bp, synthetic construct; identical to SEQ ID NO: 2712
  source 1..135: mol_type = other DNA

SEQ ID NO: 3053 - DNA, 120 bp, synthetic construct; identical to SEQ ID NO: 2671
  source 1..120: mol_type = other DNA

SEQ ID NO: 3054 - DNA, 132 bp, synthetic construct
  source 1..132: mol_type = other DNA
taaagatgagttatactcaaacaataactatcaaggatgaaaatatgacaataatcatcatacatttcctgtggatagccctgtcttggttggcggcaagtttccaagcctaccttgaccttgacagtctgc

SEQ ID NO: 3055 - DNA, 132 bp, synthetic construct; identical to SEQ ID NO: 3054
  source 1..132: mol_type = other DNA

SEQ ID NO: 3056 - DNA, 120 bp, synthetic construct; identical to SEQ ID NO: 837
  source 1..120: mol_type = other DNA

SEQ ID NO: 3057 - DNA, 114 bp, synthetic construct; identical to SEQ ID NO: 2718
  source 1..114: mol_type = other DNA

SEQ ID NO: 3058 - DNA, 114 bp, synthetic construct; identical to SEQ ID NO: 2720
  source 1..114: mol_type = other DNA

SEQ ID NO: 3059 - DNA, 120 bp, synthetic construct; identical to SEQ ID NO: 842
  source 1..120: mol_type = other DNA

SEQ ID NO: 3060 - DNA, 120 bp, synthetic construct; identical to SEQ ID NO: 842
  source 1..120: mol_type = other DNA

SEQ ID NO: 3061 - DNA, 120 bp, synthetic construct; identical to SEQ ID NO: 2727
  source 1..120: mol_type = other DNA

SEQ ID NO: 3062 - DNA, 132 bp, synthetic construct; identical to SEQ ID NO: 2729
  source 1..132: mol_type = other DNA

SEQ ID NO: 3063 - DNA, 132 bp, synthetic construct; identical to SEQ ID NO: 2731
  source 1..132: mol_type = other DNA

SEQ ID NO: 3064 - DNA, 132 bp, synthetic construct; identical to SEQ ID NO: 2731
  source 1..132: mol_type = other DNA

SEQ ID NO: 3065 - DNA, 132 bp, synthetic construct; identical to SEQ ID NO: 2731
  source 1..132: mol_type = other DNA

SEQ ID NO: 3066 - DNA, 120 bp, synthetic construct; identical to SEQ ID NO: 2719
  source 1..120: mol_type = other DNA

SEQ ID NO: 3067 - DNA, 120 bp, synthetic construct; identical to SEQ ID NO: 2719
  source 1..120: mol_type = other DNA

SEQ ID NO: 3068 - DNA, 120 bp, synthetic construct; identical to SEQ ID NO: 2600
  source 1..120: mol_type = other DNA

SEQ ID NO: 3069 - DNA, 120 bp, synthetic construct; identical to SEQ ID NO: 2600
  source 1..120: mol_type = other DNA

SEQ ID NO: 3070 - DNA, 120 bp, synthetic construct; identical to SEQ ID NO: 2600
  source 1..120: mol_type = other DNA

SEQ ID NO: 3071 - DNA, 132 bp, synthetic construct; identical to SEQ ID NO: 3054
  source 1..132: mol_type = other DNA

SEQ ID NO: 3072 - DNA, 132 bp, synthetic construct; identical to SEQ ID NO: 3054
  source 1..132: mol_type = other DNA

SEQ ID NO: 3073 - DNA, 132 bp, synthetic construct; identical to SEQ ID NO: 3054
  source 1..132: mol_type = other DNA

SEQ ID NO: 3074 - DNA, 135 bp, synthetic construct
  source 1..135: mol_type = other DNA
taacaatcttatatattatcttaacaatcgtaataggagaatcgcatatggaagctttacgatgcatcttatgccaattgctttcaggatcattctattggatctattgttccaaagaaagatttgacaatgtat

SEQ ID NO: 3075 - DNA, 129 bp, synthetic construct; identical to SEQ ID NO: 2722
  source 1..129: mol_type = other DNA

SEQ ID NO: 3076 - DNA, 129 bp, synthetic construct; identical to SEQ ID NO: 2750
  source 1..129: mol_type = other DNA

SEQ ID NO: 3077 - DNA, 120 bp, synthetic construct; identical to SEQ ID NO: 841
  source 1..120: mol_type = other DNA

SEQ ID NO: 3078 - DNA, 117 bp, synthetic construct; identical to SEQ ID NO: 2753
  source 1..117: mol_type = other DNA

SEQ ID NO: 3079 - DNA, 117 bp, synthetic construct; identical to SEQ ID NO: 2754
  source 1..117: mol_type = other DNA

SEQ ID NO: 3080 - DNA, 117 bp, synthetic construct; identical to SEQ ID NO: 2754
  source 1..117: mol_type = other DNA

SEQ ID NO: 3081 - DNA, 117 bp, synthetic construct; identical to SEQ ID NO: 2755
  source 1..117: mol_type = other DNA

SEQ ID NO: 3082 - DNA, 132 bp, synthetic construct; identical to SEQ ID NO: 2668
  source 1..132: mol_type = other DNA

SEQ ID NO: 3083 - DNA, 132 bp, synthetic construct; identical to SEQ ID NO: 2668
  source 1..132: mol_type = other DNA

SEQ ID NO: 3084 - DNA, 117 bp, synthetic construct; identical to SEQ ID NO: 2757
  source 1..117: mol_type = other DNA

SEQ ID NO: 3085 - DNA, 120 bp, synthetic construct; identical to SEQ ID NO: 2758
  source 1..120: mol_type = other DNA

SEQ ID NO: 3086 - DNA, 120 bp, synthetic construct; identical to SEQ ID NO: 2607
  source 1..120: mol_type = other DNA

SEQ ID NO: 3087 - DNA, 120 bp, synthetic construct; identical to SEQ ID NO: 2607
  source 1..120: mol_type = other DNA

SEQ ID NO: 3088 - DNA, 135 bp, synthetic construct; identical to SEQ ID NO: 840
  source 1..135: mol_type = other DNA

SEQ ID NO: 3089 - DNA, 150 bp, synthetic construct
  source 1..150: mol_type = other DNA
caagatgtgttataatgacacagaggcaagcattggaatcacgttccaagggatgcgaatcatcaacgccatcatcaaggaggttatctcgtggatatgaatatccagtggaaactcagcctcaacgcggggttgacattcagtcaattt

SEQ ID NO: 3090 - DNA, 120 bp, synthetic construct; identical to SEQ ID NO: 835
  source 1..120: mol_type = other DNA

SEQ ID NO: 3091 - DNA, 120 bp, synthetic construct; identical to SEQ ID NO: 835
  source 1..120: mol_type = other DNA

SEQ ID NO: 3092 - DNA, 132 bp, synthetic construct; identical to SEQ ID NO: 2668
  source 1..132: mol_type = other DNA

SEQ ID NO: 3093 - DNA, 132 bp, synthetic construct; identical to SEQ ID NO: 2703
  source 1..132: mol_type = other DNA

SEQ ID NO: 3094 - DNA, 132 bp, synthetic construct; identical to SEQ ID NO: 2770
  source 1..132: mol_type = other DNA

SEQ ID NO: 3095 - DNA, 132 bp, synthetic construct; identical to SEQ ID NO: 2668
  source 1..132: mol_type = other DNA

SEQ ID NO: 3096 - DNA, 132 bp, synthetic construct; identical to SEQ ID NO: 2668
  source 1..132: mol_type = other DNA

SEQ ID NO: 3097 - DNA, 123 bp, synthetic construct; identical to SEQ ID NO: 2776
  source 1..123: mol_type = other DNA

SEQ ID NO: 3098 - DNA, 132 bp, synthetic construct; identical to SEQ ID NO: 2668
  source 1..132: mol_type = other DNA

SEQ ID NO: 3099 - DNA, 120 bp, synthetic construct; identical to SEQ ID NO: 2778
  source 1..120: mol_type = other DNA

SEQ ID NO: 3100 - DNA, 117 bp, synthetic construct; identical to SEQ ID NO: 2781
  source 1..117: mol_type = other DNA

SEQ ID NO: 3101 - DNA, 132 bp, synthetic construct; identical to SEQ ID NO: 2628
  source 1..132: mol_type = other DNA

SEQ ID NO: 3102 - DNA, 132 bp, synthetic construct; identical to SEQ ID NO: 2668
  source 1..132: mol_type = other DNA

SEQ ID NO: 3103 - DNA, 132 bp, synthetic construct; identical to SEQ ID NO: 2785
  source 1..132: mol_type = other DNA

SEQ ID NO: 3104 - DNA, 117 bp, synthetic construct; identical to SEQ ID NO: 2787
  source 1..117: mol_type = other DNA

SEQ ID NO: 3105 - DNA, 117 bp, synthetic construct; identical to SEQ ID NO: 2787
  source 1..117: mol_type = other DNA

SEQ ID NO: 3106 - DNA, 132 bp, synthetic construct; identical to SEQ ID NO: 2789
  source 1..132: mol_type = other DNA

SEQ ID NO: 3107 - DNA, 117 bp, synthetic construct; identical to SEQ ID NO: 2787
  source 1..117: mol_type = other DNA

SEQ ID NO: 3108 - DNA, 117 bp, synthetic construct; identical to SEQ ID NO: 2787
  source 1..117: mol_type = other DNA

SEQ ID NO: 3109 - DNA, 117 bp, synthetic construct; identical to SEQ ID NO: 2787
  source 1..117: mol_type = other DNA

SEQ ID NO: 3110 - DNA, 120 bp, synthetic construct; identical to SEQ ID NO: 2634
  source 1..120: mol_type = other DNA

SEQ ID NO: 3111 - DNA, 117 bp, synthetic construct; identical to SEQ ID NO: 2787
  source 1..117: mol_type = other DNA

SEQ ID NO: 3112 - DNA, 132 bp, synthetic construct; identical to SEQ ID NO: 2668
  source 1..132: mol_type = other DNA

SEQ ID NO: 3113 - DNA, 132 bp, synthetic construct; identical to SEQ ID NO: 2798
  source 1..132: mol_type = other DNA

SEQ ID NO: 3114 - DNA, 123 bp, synthetic construct; identical to SEQ ID NO: 2799
  source 1..123: mol_type = other DNA

SEQ ID NO: 3115 - DNA, 132 bp, synthetic construct; identical to SEQ ID NO: 2668
  source 1..132: mol_type = other DNA

SEQ ID NO: 3116 - DNA, 132 bp, synthetic construct; identical to SEQ ID NO: 2668
  source 1..132: mol_type = other DNA

SEQ ID NO: 3117 - DNA, 132 bp, synthetic construct; identical to SEQ ID NO: 2668
  source 1..132: mol_type = other DNA

SEQ ID NO: 3118 - DNA, 132 bp, synthetic construct; identical to SEQ ID NO: 2668
  source 1..132: mol_type = other DNA

SEQ ID NO: 3119 - DNA, 132 bp, synthetic construct; identical to SEQ ID NO: 2668
  source 1..132: mol_type = other DNA

SEQ ID NO: 3120 - DNA, 132 bp, synthetic construct; identical to SEQ ID NO: 2668
  source 1..132: mol_type = other DNA

SEQ ID NO: 3121 - DNA, 132 bp, synthetic construct; identical to SEQ ID NO: 2668
  source 1..132: mol_type = other DNA

SEQ ID NO: 3122 - DNA, 129 bp, synthetic construct; identical to SEQ ID NO: 2801
  source 1..129: mol_type = other DNA

SEQ ID NO: 3123 - DNA, 129 bp, synthetic construct; identical to SEQ ID NO: 2802
  source 1..129: mol_type = other DNA

SEQ ID NO: 3124 - DNA, 129 bp, synthetic construct; identical to SEQ ID NO: 2801
  source 1..129: mol_type = other DNA

SEQ ID NO: 3125 - DNA, 129 bp, synthetic construct; identical to SEQ ID NO: 2801
  source 1..129: mol_type = other DNA

SEQ ID NO: 3126 - DNA, 129 bp, synthetic construct; identical to SEQ ID NO: 2810
  source 1..129: mol_type = other DNA

SEQ ID NO: 3127 - DNA, 132 bp, synthetic construct; identical to SEQ ID NO: 2811
  source 1..132: mol_type = other DNA

SEQ ID NO: 3128 - DNA, 129 bp, synthetic construct; identical to SEQ ID NO: 2810
  source 1..129: mol_type = other DNA

SEQ ID NO: 3129 - DNA, 120 bp, synthetic construct; identical to SEQ ID NO: 2634
  source 1..120: mol_type = other DNA

SEQ ID NO: 3130 - DNA, 132 bp, synthetic construct; identical to SEQ ID NO: 2708
  source 1..132: mol_type = other DNA

SEQ ID NO: 3131 - DNA, 132 bp, synthetic construct; identical to SEQ ID NO: 2668
  source 1..132: mol_type = other DNA

SEQ ID NO: 3132 - DNA, 132 bp, synthetic construct; identical to SEQ ID NO: 2668
  source 1..132: mol_type = other DNA

SEQ ID NO: 3133 - DNA, 120 bp, synthetic construct; identical to SEQ ID NO: 2823
  source 1..120: mol_type = other DNA

SEQ ID NO: 3134 - DNA, 117 bp, synthetic construct; identical to SEQ ID NO: 2757
  source 1..117: mol_type = other DNA

SEQ ID NO: 3135 - DNA, 117 bp, synthetic construct; identical to SEQ ID NO: 2757
  source 1..117: mol_type = other DNA

SEQ ID NO: 3136 - DNA, 117 bp, synthetic construct; identical to SEQ ID NO: 2787
  source 1..117: mol_type = other DNA

SEQ ID NO: 3137 - DNA, 120 bp, synthetic construct; identical to SEQ ID NO: 2826
  source 1..120: mol_type = other DNA

SEQ ID NO: 3138 - DNA, 117 bp, synthetic construct; identical to SEQ ID NO: 2757
  source 1..117: mol_type = other DNA

SEQ ID NO: 3139 - DNA, 111 bp, synthetic construct; identical to SEQ ID NO: 2641
  source 1..111: mol_type = other DNA

SEQ ID NO: 3140 - DNA, 111 bp, synthetic construct; identical to SEQ ID NO: 2641
  source 1..111: mol_type = other DNA

SEQ ID NO: 3141 - DNA, 117 bp, synthetic construct; identical to SEQ ID NO: 2757
  source 1..117: mol_type = other DNA

SEQ ID NO: 3142 - DNA, 111 bp, synthetic construct; identical to SEQ ID NO: 2641
  source 1..111: mol_type = other DNA

SEQ ID NO: 3143 - DNA, 111 bp, synthetic construct; identical to SEQ ID NO: 2641
  source 1..111: mol_type = other DNA

SEQ ID NO: 3144 - DNA, 111 bp, synthetic construct; identical to SEQ ID NO: 2641
  source 1..111: mol_type = other DNA

SEQ ID NO: 3145 - DNA, 111 bp, synthetic construct; identical to SEQ ID NO: 2639
  source 1..111: mol_type = other DNA

SEQ ID NO: 3146 - DNA, 117 bp, synthetic construct; identical to SEQ ID NO: 2649
  source 1..117: mol_type = other DNA

SEQ ID NO: 3147 - DNA, 111 bp, synthetic construct; identical to SEQ ID NO: 2641
  source 1..111: mol_type = other DNA

SEQ ID NO: 3148 - DNA, 111 bp, synthetic construct; identical to SEQ ID NO: 2641
  source 1..111: mol_type = other DNA

SEQ ID NO: 3149 - DNA, 111 bp, synthetic construct; identical to SEQ ID NO: 2639
  source 1..111: mol_type = other DNA

SEQ ID NO: 3150 - DNA, 111 bp, synthetic construct; identical to SEQ ID NO: 2639
  source 1..111: mol_type = other DNA

SEQ ID NO: 3151 - DNA, 117 bp, synthetic construct; identical to SEQ ID NO: 2757
  source 1..117: mol_type = other DNA

SEQ ID NO: 3152 - DNA, 111 bp, synthetic construct; identical to SEQ ID NO: 2639
  source 1..111: mol_type = other DNA

SEQ ID NO: 3153 - DNA, 111 bp, synthetic construct; identical to SEQ ID NO: 2639
  source 1..111: mol_type = other DNA

SEQ ID NO: 3154 - DNA, 111 bp, synthetic construct; identical to SEQ ID NO: 2639
  source 1..111: mol_type = other DNA

SEQ ID NO: 3155 - DNA, 111 bp, synthetic construct; identical to SEQ ID NO: 2641
  source 1..111: mol_type = other DNA

SEQ ID NO: 3156 - DNA, 120 bp, synthetic construct; identical to SEQ ID NO: 837
  source 1..120: mol_type = other DNA

SEQ ID NO: 3157 - DNA, 120 bp, synthetic construct; identical to SEQ ID NO: 837
  source 1..120: mol_type = other DNA

SEQ ID NO: 3158 - DNA, 111 bp, synthetic construct; identical to SEQ ID NO: 2643
  source 1..111: mol_type = other DNA

SEQ ID NO: 3159 - DNA, 111 bp, synthetic construct; identical to SEQ ID NO: 2643
  source 1..111: mol_type = other DNA

SEQ ID NO: 3160 - DNA, 111 bp, synthetic construct; identical to SEQ ID NO: 2639
  source 1..111: mol_type = other DNA

SEQ ID NO: 3161 - DNA, 120 bp, synthetic construct; identical to SEQ ID NO: 837
  source 1..120: mol_type = other DNA

SEQ ID NO: 3162 - DNA, 120 bp, synthetic construct; identical to SEQ ID NO: 837
  source 1..120: mol_type = other DNA

SEQ ID NO: 3163 - DNA, 117 bp, synthetic construct; identical to SEQ ID NO: 2757
  source 1..117: mol_type = other DNA

SEQ ID NO: 3164 - DNA, 117 bp, synthetic construct; identical to SEQ ID NO: 2757
  source 1..117: mol_type = other DNA

SEQ ID NO: 3165 - DNA, 120 bp, synthetic construct; identical to SEQ ID NO: 837
  source 1..120: mol_type = other DNA

SEQ ID NO: 3166 - DNA, 117 bp, synthetic construct; identical to SEQ ID NO: 2837
  source 1..117: mol_type = other DNA

SEQ ID NO: 3167 - DNA, 132 bp, synthetic construct; identical to SEQ ID NO: 2731
  source 1..132: mol_type = other DNA

SEQ ID NO: 3168 - DNA, 132 bp, synthetic construct; identical to SEQ ID NO: 2839
  source 1..132: mol_type = other DNA

SEQ ID NO: 3169 - DNA, 117 bp, synthetic construct; identical to SEQ ID NO: 2686
  source 1..117: mol_type = other DNA

SEQ ID NO: 3170 - DNA, 117 bp, synthetic construct; identical to SEQ ID NO: 2686
  source 1..117: mol_type = other DNA

SEQ ID NO: 3171 - DNA, 132 bp, synthetic construct; identical to SEQ ID NO: 2731
  source 1..132: mol_type = other DNA

SEQ ID NO: 3172 - DNA, 132 bp, synthetic construct; identical to SEQ ID NO: 2731
  source 1..132: mol_type = other DNA

SEQ ID NO: 3173 - DNA, 120 bp, synthetic construct; identical to SEQ ID NO: 2696
  source 1..120: mol_type = other DNA

SEQ ID NO: 3174 - DNA, 132 bp, synthetic construct; identical to SEQ ID NO: 2731
  source 1..132: mol_type = other DNA

SEQ ID NO: 3175 - DNA, 132 bp, synthetic construct; identical to SEQ ID NO: 2839
  source 1..132: mol_type = other DNA

SEQ ID NO: 3176 - DNA, 132 bp, synthetic construct; identical to SEQ ID NO: 2839
  source 1..132: mol_type = other DNA

SEQ ID NO: 3177 - DNA, 120 bp, synthetic construct; identical to SEQ ID NO: 2638
  source 1..120: mol_type = other DNA

SEQ ID NO: 3178 - DNA, 120 bp, synthetic construct; identical to SEQ ID NO: 2638
  source 1..120: mol_type = other DNA

SEQ ID NO: 3179 - DNA, 120 bp, synthetic construct; identical to SEQ ID NO: 2696
  source 1..120: mol_type = other DNA

SEQ ID NO: 3180 - DNA, 120 bp, synthetic construct; identical to SEQ ID NO: 2696
  source 1..120: mol_type = other DNA

SEQ ID NO: 3181 - DNA, 117 bp, synthetic construct; identical to SEQ ID NO: 2653
  source 1..117: mol_type = other DNA

SEQ ID NO: 3182 - DNA, 117 bp, synthetic construct; identical to SEQ ID NO: 2686
  source 1..117: mol_type = other DNA

SEQ ID NO: 3183 - DNA, 114 bp, synthetic construct; identical to SEQ ID NO: 2682
  source 1..114: mol_type = other DNA

SEQ ID NO: 3184 - DNA, 114 bp, synthetic construct; identical to SEQ ID NO: 2844
  source 1..114: mol_type = other DNA

SEQ ID NO: 3185 - DNA, 120 bp, synthetic construct; identical to SEQ ID NO: 2695
  source 1..120: mol_type = other DNA

SEQ ID NO: 3186 - DNA, 120 bp, synthetic construct; identical to SEQ ID NO: 2695
  source 1..120: mol_type = other DNA

SEQ ID NO: 3187 - DNA, 111 bp, synthetic construct; identical to SEQ ID NO: 2846
  source 1..111: mol_type = other DNA

SEQ ID NO: 3188 - DNA, 120 bp, synthetic construct; identical to SEQ ID NO: 2719
  source 1..120: mol_type = other DNA

SEQ ID NO: 3189 - DNA, 111 bp, synthetic construct; identical to SEQ ID NO: 2849
  source 1..111: mol_type = other DNA

SEQ ID NO: 3190 - DNA, 132 bp, synthetic construct; identical to SEQ ID NO: 2731
  source 1..132: mol_type = other DNA

SEQ ID NO: 3191 - DNA, 132 bp, synthetic construct; identical to SEQ ID NO: 2731
  source 1..132: mol_type = other DNA

SEQ ID NO: 3192 - DNA, 132 bp, synthetic construct; identical to SEQ ID NO: 2731
  source 1..132: mol_type = other DNA

SEQ ID NO: 3193 - DNA, 111 bp, synthetic construct; identical to SEQ ID NO: 2851
  source 1..111: mol_type = other DNA

SEQ ID NO: 3194 - DNA, 111 bp, synthetic construct; identical to SEQ ID NO: 2852
  source 1..111: mol_type = other DNA

SEQ ID NO: 3195 - DNA, 117 bp, synthetic construct; identical to SEQ ID NO: 2686
  source 1..117: mol_type = other DNA

SEQ ID NO: 3196 - DNA, 117 bp, synthetic construct; identical to SEQ ID NO: 2686
  source 1..117: mol_type = other DNA

SEQ ID NO: 3197 - DNA, 111 bp, synthetic construct; identical to SEQ ID NO: 2853
  source 1..111: mol_type = other DNA

SEQ ID NO: 3198 - DNA, 117 bp, synthetic construct; identical to SEQ ID NO: 2687
  source 1..117: mol_type = other DNA

SEQ ID NO: 3199 - DNA, 120 bp, synthetic construct; identical to SEQ ID NO: 2856
  source 1..120: mol_type = other DNA

SEQ ID NO: 3200 - DNA, 120 bp, synthetic construct; identical to SEQ ID NO: 2857
  source 1..120: mol_type = other DNA

SEQ ID NO: 3201 - DNA, 120 bp, synthetic construct; identical to SEQ ID NO: 2856
  source 1..120: mol_type = other DNA

SEQ ID NO: 3202 - DNA, 120 bp, synthetic construct; identical to SEQ ID NO: 2860
  source 1..120: mol_type = other DNA

SEQ ID NO: 3203 - DNA, 129 bp, synthetic construct; identical to SEQ ID NO: 2862
  source 1..129: mol_type = other DNA

SEQ ID NO: 3204 - DNA, 117 bp, synthetic construct; identical to SEQ ID NO: 2863
  source 1..117: mol_type = other DNA

SEQ ID NO: 3205 - DNA, 120 bp, synthetic construct; identical to SEQ ID NO: 2758
  source 1..120: mol_type = other DNA

SEQ ID NO: 3206 - DNA, 120 bp, synthetic construct; identical to SEQ ID NO: 2758
  source 1..120: mol_type = other DNA

SEQ ID NO: 3207 - DNA, 120 bp, synthetic construct; identical to SEQ ID NO: 2758
  source 1..120: mol_type = other DNA

SEQ ID NO: 3208 - DNA, 120 bp, synthetic construct; identical to SEQ ID NO: 2695
  source 1..120: mol_type = other DNA

SEQ ID NO: 3209 - DNA, 120 bp, synthetic construct; identical to SEQ ID NO: 2695
  source 1..120: mol_type = other DNA

SEQ ID NO: 3210 - DNA, 120 bp, synthetic construct; identical to SEQ ID NO: 2696
  source 1..120: mol_type = other DNA

SEQ ID NO: 3211 - DNA, 120 bp, synthetic construct; identical to SEQ ID NO: 2719
  source 1..120: mol_type = other DNA

SEQ ID NO: 3212 - DNA, 120 bp, synthetic construct; identical to SEQ ID NO: 2719
  source 1..120: mol_type = other DNA

SEQ ID NO: 3213 - DNA, 120 bp, synthetic construct; identical to SEQ ID NO: 2719
  source 1..120: mol_type = other DNA

SEQ ID NO: 3214 - DNA, 120 bp, synthetic construct; identical to SEQ ID NO: 2719
  source 1..120: mol_type = other DNA

SEQ ID NO: 3215 - DNA, 120 bp, synthetic construct; identical to SEQ ID NO: 2874
  source 1..120: mol_type = other DNA

SEQ ID NO: 3216 - DNA, 129 bp, synthetic construct; identical to SEQ ID NO: 2764
  source 1..129: mol_type = other DNA

SEQ ID NO: 3217 - DNA, 132 bp, synthetic construct; identical to SEQ ID NO: 2708
  source 1..132: mol_type = other DNA

SEQ ID NO: 3218 - DNA, 132 bp, synthetic construct; identical to SEQ ID NO: 2708
  source 1..132: mol_type = other DNA

SEQ ID NO: 3219 - DNA, 117 bp, synthetic construct; identical to SEQ ID NO: 2878
  source 1..117: mol_type = other DNA

SEQ ID NO: 3220 - DNA, 111 bp, synthetic construct; identical to SEQ ID NO: 2849
  source 1..111: mol_type = other DNA

SEQ ID NO: 3221 - DNA, 117 bp, synthetic construct; identical to SEQ ID NO: 2757
  source 1..117: mol_type = other DNA

SEQ ID NO: 3222 - DNA, 117 bp, synthetic construct; identical to SEQ ID NO: 2757
  source 1..117: mol_type = other DNA

SEQ ID NO: 3223 - DNA, 117 bp, synthetic construct; identical to SEQ ID NO: 2637
  source 1..117: mol_type = other DNA

SEQ ID NO: 3224 - DNA, 111 bp, synthetic construct; identical to SEQ ID NO: 2641
  source 1..111: mol_type = other DNA

SEQ ID NO: 3225 - DNA, 111 bp, synthetic construct; identical to SEQ ID NO: 2641
  source 1..111: mol_type = other DNA

SEQ ID NO: 3226 - DNA, 117 bp, synthetic construct; identical to SEQ ID NO: 2886
  source 1..117: mol_type = other DNA

SEQ ID NO: 3227 - DNA, 117 bp, synthetic construct; identical to SEQ ID NO: 2757
  source 1..117: mol_type = other DNA

SEQ ID NO: 3228 - DNA, 117 bp, synthetic construct; identical to SEQ ID NO: 2887
  source 1..117: mol_type = other DNA

SEQ ID NO: 3229 - DNA, 117 bp, synthetic construct; identical to SEQ ID NO: 2649
  source 1..117: mol_type = other DNA

SEQ ID NO: 3230 - DNA, 120 bp, synthetic construct; identical to SEQ ID NO: 2820
  source 1..120: mol_type = other DNA

SEQ ID NO: 3231 - DNA, 117 bp, synthetic construct; identical to SEQ ID NO: 2652
  source 1..117: mol_type = other DNA

SEQ ID NO: 3232 - DNA, 117 bp, synthetic construct; identical to SEQ ID NO: 2652
  source 1..117: mol_type = other DNA

SEQ ID NO: 3233 - DNA, 132 bp, synthetic construct; identical to SEQ ID NO: 2731
  source 1..132: mol_type = other DNA

SEQ ID NO: 3234 - DNA, 132 bp, synthetic construct; identical to SEQ ID NO: 2731
  source 1..132: mol_type = other DNA

SEQ ID NO: 3235 - DNA, 132 bp, synthetic construct; identical to SEQ ID NO: 2731
  source 1..132: mol_type = other DNA

SEQ ID NO: 3236 - DNA, 111 bp, synthetic construct; identical to SEQ ID NO: 2888
  source 1..111: mol_type = other DNA

SEQ ID NO: 3237 - DNA, 111 bp, synthetic construct; identical to SEQ ID NO: 2889
  source 1..111: mol_type = other DNA

SEQ ID NO: 3238 - DNA, 111 bp, synthetic construct; identical to SEQ ID NO: 2834
  source 1..111: mol_type = other DNA

SEQ ID NO: 3239 - DNA, 117 bp, synthetic construct; identical to SEQ ID NO: 2757
  source 1..117: mol_type = other DNA

SEQ ID NO: 3240 - DNA, 117 bp, synthetic construct; identical to SEQ ID NO: 2757
  source 1..117: mol_type = other DNA

SEQ ID NO: 3241 - DNA, 117 bp, synthetic construct; identical to SEQ ID NO: 2757
  source 1..117: mol_type = other DNA

SEQ ID NO: 3242 - DNA, 117 bp, synthetic construct; identical to SEQ ID NO: 2757
  source 1..117: mol_type = other DNA

SEQ ID NO: 3243 - DNA, 117 bp, synthetic construct; identical to SEQ ID NO: 2757
  source 1..117: mol_type = other DNA

SEQ ID NO: 3244 - DNA, 117 bp, synthetic construct; identical to SEQ ID NO: 2757
  source 1..117: mol_type = other DNA

SEQ ID NO: 3245 - DNA, 120 bp, synthetic construct; identical to SEQ ID NO: 2895
  source 1..120: mol_type = other DNA

SEQ ID NO: 3246 - DNA, 117 bp, synthetic construct; identical to SEQ ID NO: 2757
  source 1..117: mol_type = other DNA

SEQ ID NO: 3247 - DNA, 129 bp, synthetic construct; identical to SEQ ID NO: 2897
  source 1..129: mol_type = other DNA

SEQ ID NO: 3248 - DNA, 111 bp, synthetic construct; identical to SEQ ID NO: 2898
  source 1..111: mol_type = other DNA

SEQ ID NO: 3249 - DNA, 117 bp, synthetic construct; identical to SEQ ID NO: 2878
  source 1..117: mol_type = other DNA

SEQ ID NO: 3250 - DNA, 111 bp, synthetic construct; identical to SEQ ID NO: 2901
  source 1..111: mol_type = other DNA

SEQ ID NO: 3251 - DNA, 117 bp, synthetic construct; identical to SEQ ID NO: 2878
  source 1..117: mol_type = other DNA

SEQ ID NO: 3252 - DNA, 120 bp, synthetic construct; identical to SEQ ID NO: 837
  source 1..120: mol_type = other DNA

SEQ ID NO: 3253 - DNA, 117 bp, synthetic construct; identical to SEQ ID NO: 2904
  source 1..117: mol_type = other DNA

SEQ ID NO: 3254 - DNA, 120 bp, synthetic construct; identical to SEQ ID NO: 2719
  source 1..120: mol_type = other DNA

SEQ ID NO: 3255 - DNA, 120 bp, synthetic construct; identical to SEQ ID NO: 2719
  source 1..120: mol_type = other DNA

SEQ ID NO: 3256 - DNA, 117 bp, synthetic construct; identical to SEQ ID NO: 2757
  source 1..117: mol_type = other DNA

SEQ ID NO: 3257 - DNA, 117 bp, synthetic construct; identical to SEQ ID NO: 2757
  source 1..117: mol_type = other DNA

SEQ ID NO: 3258 - DNA, 120 bp, synthetic construct; identical to SEQ ID NO: 2719
  source 1..120: mol_type = other DNA

SEQ ID NO: 3259 - DNA, 120 bp, synthetic construct; identical to SEQ ID NO: 2905
  source 1..120: mol_type = other DNA

SEQ ID NO: 3260 - DNA, 117 bp, synthetic construct; identical to SEQ ID NO: 2637
  source 1..117: mol_type = other DNA

SEQ ID NO: 3261 - DNA, 117 bp, synthetic construct; identical to SEQ ID NO: 2637
  source 1..117: mol_type = other DNA

SEQ ID NO: 3262 - DNA, 117 bp, synthetic construct; identical to SEQ ID NO: 2757
  source 1..117: mol_type = other DNA

SEQ ID NO: 3263 - DNA, 117 bp, synthetic construct; identical to SEQ ID NO: 2649
  source 1..117: mol_type = other DNA

SEQ ID NO: 3264 - DNA, 117 bp, synthetic construct; identical to SEQ ID NO: 2649
  source 1..117: mol_type = other DNA

SEQ ID NO: 3265 - DNA, 105 bp, synthetic construct; identical to SEQ ID NO: 2910
  source 1..105: mol_type = other DNA

SEQ ID NO: 3266 - DNA, 120 bp, synthetic construct; identical to SEQ ID NO: 2860
  source 1..120: mol_type = other DNA

SEQ ID NO: 3267 - DNA, 117 bp, synthetic construct; identical to SEQ ID NO: 2658
  source 1..117: mol_type = other DNA

SEQ ID NO: 3268 - DNA, 117 bp, synthetic construct; identical to SEQ ID NO: 2917
  source 1..117: mol_type = other DNA

SEQ ID NO: 3269 - DNA, 129 bp, synthetic construct; identical to SEQ ID NO: 2810
  source 1..129: mol_type = other DNA

SEQ ID NO: 3270 - DNA, 117 bp, synthetic construct; identical to SEQ ID NO: 2646
  source 1..117: mol_type = other DNA

SEQ ID NO: 3271 - DNA, 117 bp, synthetic construct; identical to SEQ ID NO: 2646
  source 1..117: mol_type = other DNA

SEQ ID NO: 3272 - DNA, 111 bp, synthetic construct; identical to SEQ ID NO: 2639
  source 1..111: mol_type = other DNA

SEQ ID NO: 3273 - DNA, 117 bp, synthetic construct; identical to SEQ ID NO: 2896
  source 1..117: mol_type = other DNA

SEQ ID NO: 3274 - DNA, 120 bp, synthetic construct; identical to SEQ ID NO: 2719
  source 1..120: mol_type = other DNA

SEQ ID NO: 3275 - DNA, 120 bp, synthetic construct; identical to SEQ ID NO: 2719
  source 1..120: mol_type = other DNA

SEQ ID NO: 3276 - DNA, 123 bp, synthetic construct; identical to SEQ ID NO: 2925
  source 1..123: mol_type = other DNA

SEQ ID NO: 3277 - DNA, 123 bp, synthetic construct; identical to SEQ ID NO: 2925
  source 1..123: mol_type = other DNA

SEQ ID NO: 3278 - DNA, 132 bp, synthetic construct; identical to SEQ ID NO: 2929
  source 1..132: mol_type = other DNA

SEQ ID NO: 3279 - DNA, 132 bp, synthetic construct; identical to SEQ ID NO: 2930
  source 1..132: mol_type = other DNA

SEQ ID NO: 3280 - DNA, 120 bp, synthetic construct; identical to SEQ ID NO: 2696
  source 1..120: mol_type = other DNA

SEQ ID NO: 3281 - DNA, 129 bp, synthetic construct; identical to SEQ ID NO: 2933
  source 1..129: mol_type = other DNA

SEQ ID NO: 3282 - DNA, 117 bp, synthetic construct; identical to SEQ ID NO: 2896
  source 1..117: mol_type = other DNA

SEQ ID NO: 3283 - DNA, 117 bp, synthetic construct; identical to SEQ ID NO: 2896
  source 1..117: mol_type = other DNA

SEQ ID NO: 3284 - DNA, 138 bp, synthetic construct
  source 1..138: mol_type = other DNA
taaagatgaattataatcaaacagatataattaccaaggagttaaacatgacaataatctatgccatgcgtttcctgttgataatactgtcatggtctatggcaactttcgaagcctataatgaccttgacagtctgc

SEQ ID NO: 3285 - DNA, 138 bp, synthetic construct; identical to SEQ ID NO: 3284
  source 1..138: mol_type = other DNA

SEQ ID NO: 3286 - DNA, 138 bp, synthetic construct; identical to SEQ ID NO: 3284
  source 1..138: mol_type = other DNA

SEQ ID NO: 3287 - DNA, 138 bp, synthetic construct
  source 1..138: mol_type = other DNA
taaagatgaattataatcaaacagatataatcaccaaggagttcggtatgacaatagtctatgccatgcgtttcctgttggtaatactgtcatggtctatggcaactttcgaagcctataatgaccttgacagtctgc

SEQ ID NO: 3288 - DNA, 117 bp, synthetic construct; identical to SEQ ID NO: 2653
  source 1..117: mol_type = other DNA

SEQ ID NO: 3289 - DNA, 120 bp, synthetic construct; identical to SEQ ID NO: 2719
  source 1..120: mol_type = other DNA

SEQ ID NO: 3290 - DNA, 120 bp, synthetic construct; identical to SEQ ID NO: 2696
  source 1..120: mol_type = other DNA

SEQ ID NO: 3291 - DNA, 117 bp, synthetic construct; identical to SEQ ID NO: 2650
  source 1..117: mol_type = other DNA

SEQ ID NO: 3292 - DNA, 120 bp, synthetic construct; identical to SEQ ID NO: 2696
  source 1..120: mol_type = other DNA

SEQ ID NO: 3293 - DNA, 153 bp, synthetic construct; identical to SEQ ID NO: 2743
  source 1..153: mol_type = other DNA

SEQ ID NO: 3294 - DNA, 153 bp, synthetic construct; identical to SEQ ID NO: 2743
  source 1..153: mol_type = other DNA

SEQ ID NO: 3295 - DNA, 153 bp, synthetic construct; identical to SEQ ID NO: 2744
  source 1..153: mol_type = other DNA

SEQ ID NO: 3296 - DNA, 153 bp, synthetic construct; identical to SEQ ID NO: 2744
  source 1..153: mol_type = other DNA

SEQ ID NO: 3297 - DNA, 111 bp, synthetic construct; identical to SEQ ID NO: 2961
  source 1..111: mol_type = other DNA

SEQ ID NO: 3298 - DNA, 126 bp, synthetic construct; identical to SEQ ID NO: 2966
  source 1..126: mol_type = other DNA

SEQ ID NO: 3299 - DNA, 117 bp, synthetic construct; identical to SEQ ID NO: 2972
  source 1..117: mol_type = other DNA

SEQ ID NO: 3300 - DNA, 117 bp, synthetic construct; identical to SEQ ID NO: 2973
  source 1..117: mol_type = other DNA

SEQ ID NO: 3301 - DNA, 117 bp, synthetic construct; identical to SEQ ID NO: 2650
  source 1..117: mol_type = other DNA

SEQ ID NO: 3302 - DNA, 117 bp, synthetic construct; identical to SEQ ID NO: 2650
  source 1..117: mol_type = other DNA

SEQ ID NO: 3303 - DNA, 120 bp, synthetic construct; identical to SEQ ID NO: 2975
  source 1..120: mol_type = other DNA

SEQ ID NO: 3304 - DNA, 120 bp, synthetic construct; identical to SEQ ID NO: 2979
  source 1..120: mol_type = other DNA

SEQ ID NO: 3305 - DNA, 120 bp, synthetic construct; identical to SEQ ID NO: 2979
  source 1..120: mol_type = other DNA

SEQ ID NO: 3306 - DNA, 126 bp, synthetic construct; identical to SEQ ID NO: 2926
  source 1..126: mol_type = other DNA

SEQ ID NO: 3307 - DNA, 120 bp, synthetic construct; identical to SEQ ID NO: 2696
  source 1..120: mol_type = other DNA

SEQ ID NO: 3308 - DNA, 120 bp, synthetic construct; identical to SEQ ID NO: 2719
  source 1..120: mol_type = other DNA

SEQ ID NO: 3309 - DNA, 120 bp, synthetic construct; identical to SEQ ID NO: 2719
  source 1..120: mol_type = other DNA

SEQ ID NO: 3310 - DNA, 120 bp, synthetic construct; identical to SEQ ID NO: 2719
  source 1..120: mol_type = other DNA

SEQ ID NO: 3311 - DNA, 126 bp, synthetic construct
  source 1..126: mol_type = other DNA
tagagatgatttattatcagtcaaccagagaggtcactatgacaaattatgccattcgtttcctgttgatagtcgtgtcattgctttacgcgggtctagaggcctgcgtagaacttgacagtttac

SEQ ID NO: 3312 - DNA, 120 bp, synthetic construct; identical to SEQ ID NO: 2695
  source 1..120: mol_type = other DNA

SEQ ID NO: 3313 - DNA, 138 bp, synthetic construct; identical to SEQ ID NO: 2602
  source 1..138: mol_type = other DNA

SEQ ID NO: 3314 - DNA, 102 bp, synthetic construct; identical to SEQ ID NO: 2604
  source 1..102: mol_type = other DNA

SEQ ID NO: 3315 - DNA, 126 bp, synthetic construct; identical to SEQ ID NO: 2608
  source 1..126: mol_type = other DNA

SEQ ID NO: 3316 - DNA, 120 bp, synthetic construct; identical to SEQ ID NO: 2619
  source 1..120: mol_type = other DNA

SEQ ID NO: 3317 - DNA, 144 bp, synthetic construct; identical to SEQ ID NO: 2621
  source 1..144: mol_type = other DNA

SEQ ID NO: 3318 - DNA, 129 bp, synthetic construct; identical to SEQ ID NO: 2618
  source 1..129: mol_type = other DNA

SEQ ID NO: 3319 - DNA, 150 bp, synthetic construct; identical to SEQ ID NO: 2623
  source 1..150: mol_type = other DNA

SEQ ID NO: 3320 - DNA, 135 bp, synthetic construct; identical to SEQ ID NO: 2609
  source 1..135: mol_type = other DNA

SEQ ID NO: 3321 - DNA, 129 bp, synthetic construct; identical to SEQ ID NO: 2659
  source 1..129: mol_type = other DNA

SEQ ID NO: 3322 - DNA, 132 bp, synthetic construct; identical to SEQ ID NO: 2665
  source 1..132: mol_type = other DNA

SEQ ID NO: 3323 - DNA, 135 bp, synthetic construct; identical to SEQ ID NO: 2670
  source 1..135: mol_type = other DNA

SEQ ID NO: 3324 - DNA, 129 bp, synthetic construct; identical to SEQ ID NO: 2667
  source 1..129: mol_type = other DNA

SEQ ID NO: 3325 - DNA, 135 bp, synthetic construct; identical to SEQ ID NO: 2685
  source 1..135: mol_type = other DNA

SEQ ID NO: 3326 - DNA, 135 bp, synthetic construct; identical to SEQ ID NO: 2685
  source 1..135: mol_type = other DNA

SEQ ID NO: 3327 - DNA, 156 bp, synthetic construct; identical to SEQ ID NO: 2694
  source 1..156: mol_type = other DNA

SEQ ID NO: 3328 - DNA, 144 bp, synthetic construct; identical to SEQ ID NO: 2701
  source 1..144: mol_type = other DNA

SEQ ID NO: 3329 - DNA, 144 bp, synthetic construct; identical to SEQ ID NO: 2702
  source 1..144: mol_type = other DNA

SEQ ID NO: 3330 - DNA, 144 bp, synthetic construct; identical to SEQ ID NO: 2714
  source 1..144: mol_type = other DNA

SEQ ID NO: 3331 - DNA, 144 bp, synthetic construct; identical to SEQ ID NO: 2716
  source 1..144: mol_type = other DNA

SEQ ID NO: 3332 - DNA, 129 bp, synthetic construct; identical to SEQ ID NO: 2676
  source 1..129: mol_type = other DNA

SEQ ID NO: 3333 - DNA, 129 bp, synthetic construct; identical to SEQ ID NO: 2676
  source 1..129: mol_type = other DNA

SEQ ID NO: 3334 - DNA, 144 bp, synthetic construct; identical to SEQ ID NO: 2735
  source 1..144: mol_type = other DNA

SEQ ID NO: 3335 - DNA, 129 bp, synthetic construct; identical to SEQ ID NO: 2678
  source 1..129: mol_type = other DNA

SEQ ID NO: 3336 - DNA, 114 bp, synthetic construct; identical to SEQ ID NO: 2738
  source 1..114: mol_type = other DNA

SEQ ID NO: 3337 - DNA, 114 bp, synthetic construct; identical to SEQ ID NO: 2739
  source 1..114: mol_type = other DNA

SEQ ID NO: 3338 - DNA, 147 bp, synthetic construct; identical to SEQ ID NO: 2742
  source 1..147: mol_type = other DNA

SEQ ID NO: 3339 - DNA, 138 bp, synthetic construct; identical to SEQ ID NO: 2749
  source 1..138: mol_type = other DNA

SEQ ID NO: 3340 - DNA, 144 bp, synthetic construct; identical to SEQ ID NO: 2759
  source 1..144: mol_type = other DNA

SEQ ID NO: 3341 - DNA, 141 bp, synthetic construct; identical to SEQ ID NO: 2768
  source 1..141: mol_type = other DNA

SEQ ID NO: 3342 - DNA, 129 bp, synthetic construct; identical to SEQ ID NO: 2756
  source 1..129: mol_type = other DNA

SEQ ID NO: 3343 - DNA, 150 bp, synthetic construct; identical to SEQ ID NO: 2773
  source 1..150: mol_type = other DNA

SEQ ID NO: 3344 - DNA, 141 bp, synthetic construct; identical to SEQ ID NO: 2779
  source 1..141: mol_type = other DNA

SEQ ID NO: 3345 - DNA, 126 bp, synthetic construct; identical to SEQ ID NO: 2780
  source 1..126: mol_type = other DNA

SEQ ID NO: 3346 - DNA, 150 bp, synthetic construct; identical to SEQ ID NO: 2782
  source 1..150: mol_type = other DNA

SEQ ID NO: 3347 - DNA, 144 bp, synthetic construct; identical to SEQ ID NO: 2784
  source 1..144: mol_type = other DNA

SEQ ID NO: 3348 - DNA, 144 bp, synthetic construct; identical to SEQ ID NO: 2784
  source 1..144: mol_type = other DNA

SEQ ID NO: 3349 - DNA, 144 bp, synthetic construct; identical to SEQ ID NO: 2786
  source 1..144: mol_type = other DNA

SEQ ID NO: 3350 - DNA, 123 bp, synthetic construct; identical to SEQ ID NO: 2793
  source 1..123: mol_type = other DNA

SEQ ID NO: 3351 - DNA, 135 bp, synthetic construct; identical to SEQ ID NO: 2803
  source 1..135: mol_type = other DNA

SEQ ID NO: 3352 - DNA, 126 bp, synthetic construct; identical to SEQ ID NO: 2804
  source 1..126: mol_type = other DNA

SEQ ID NO: 3353 - DNA, 141 bp, synthetic construct; identical to SEQ ID NO: 2792
  source 1..141: mol_type = other DNA

SEQ ID NO: 3354 - DNA, 135 bp, synthetic construct; identical to SEQ ID NO: 2633
  source 1..135: mol_type = other DNA

SEQ ID NO: 3355 - DNA, 129 bp, synthetic construct; identical to SEQ ID NO: 2827
  source 1..129: mol_type = other DNA

SEQ ID NO: 3356 - DNA, 129 bp, synthetic construct; identical to SEQ ID NO: 2756
  source 1..129: mol_type = other DNA

SEQ ID NO: 3357 - DNA, 153 bp, synthetic construct; identical to SEQ ID NO: 2838
  source 1..153: mol_type = other DNA

SEQ ID NO: 3358 - DNA, 153 bp, synthetic construct; identical to SEQ ID NO: 2838
  source 1..153: mol_type = other DNA

SEQ ID NO: 3359 - DNA, 153 bp, synthetic construct; identical to SEQ ID NO: 2838
  source 1..153: mol_type = other DNA

SEQ ID NO: 3360 - DNA, 144 bp, synthetic construct; identical to SEQ ID NO: 2843
  source 1..144: mol_type = other DNA

SEQ ID NO: 3361 - DNA, 153 bp, synthetic construct; identical to SEQ ID NO: 2848
  source 1..153: mol_type = other DNA

SEQ ID NO: 3362 - DNA, 153 bp, synthetic construct; identical to SEQ ID NO: 2850
  source 1..153: mol_type = other DNA

SEQ ID NO: 3363 - DNA, 156 bp, synthetic construct; identical to SEQ ID NO: 2855
  source 1..156: mol_type = other DNA

SEQ ID NO: 3364 - DNA, 153 bp, synthetic construct; identical to SEQ ID NO: 2858
  source 1..153: mol_type = other DNA

SEQ ID NO: 3365 - DNA, 135 bp, synthetic construct; identical to SEQ ID NO: 2861
  source 1..135: mol_type = other DNA

SEQ ID NO: 3366 - DNA, 135 bp, synthetic construct; identical to SEQ ID NO: 2870
  source 1..135: mol_type = other DNA

SEQ ID NO: 3367 - DNA, 129 bp, synthetic construct; identical to SEQ ID NO: 2876
  source 1..129: mol_type = other DNA

SEQ ID NO: 3368 - DNA, 129 bp, synthetic construct; identical to SEQ ID NO: 2756
  source 1..129: mol_type = other DNA

SEQ ID NO: 3369 - DNA, 129 bp, synthetic construct; identical to SEQ ID NO: 2756
  source 1..129: mol_type = other DNA

SEQ ID NO: 3370 - DNA, 135 bp, synthetic construct; identical to SEQ ID NO: 2772
  source 1..135: mol_type = other DNA

SEQ ID NO: 3371 - DNA, 141 bp, synthetic construct; identical to SEQ ID NO: 2877
  source 1..141: mol_type = other DNA

SEQ ID NO: 3372 - DNA, 156 bp, synthetic construct; identical to SEQ ID NO: 2879
  source 1..156: mol_type = other DNA

SEQ ID NO: 3373 - DNA, 144 bp, synthetic construct; identical to SEQ ID NO: 2622
  source 1..144: mol_type = other DNA

SEQ ID NO: 3374 - DNA, 123 bp, synthetic construct; identical to SEQ ID NO: 2892
  source 1..123: mol_type = other DNA

SEQ ID NO: 3375 - DNA, 156 bp, synthetic construct; identical to SEQ ID NO: 2899
  source 1..156: mol_type = other DNA

SEQ ID NO: 3376 - DNA, 129 bp, synthetic construct; identical to SEQ ID NO: 2902
  source 1..129: mol_type = other DNA

SEQ ID NO: 3377 - DNA, 114 bp, synthetic construct; identical to SEQ ID NO: 2739
  source 1..114: mol_type = other DNA

SEQ ID NO: 3378 - DNA, 114 bp, synthetic construct; identical to SEQ ID NO: 2739
  source 1..114: mol_type = other DNA

SEQ ID NO: 3379 - DNA, 132 bp, synthetic construct; identical to SEQ ID NO: 2903
  source 1..132: mol_type = other DNA

SEQ ID NO: 3380 - DNA, 114 bp, synthetic construct; identical to SEQ ID NO: 2739
  source 1..114: mol_type = other DNA

SEQ ID NO: 3381 - DNA, 120 bp, synthetic construct; identical to SEQ ID NO: 2740
  source 1..120: mol_type = other DNA

SEQ ID NO: 3382 - DNA, 120 bp, synthetic construct; identical to SEQ ID NO: 2740
  source 1..120: mol_type = other DNA

SEQ ID NO: 3383 - DNA, 144 bp, synthetic construct; identical to SEQ ID NO: 2932
  source 1..144: mol_type = other DNA

SEQ ID NO: 3384 - DNA, 141 bp, synthetic construct; identical to SEQ ID NO: 2741
  source 1..141: mol_type = other DNA

SEQ ID NO: 3385 - DNA, 135 bp, synthetic construct; identical to SEQ ID NO: 2939
  source 1..135: mol_type = other DNA

SEQ ID NO: 3386 - DNA, 135 bp, synthetic construct; identical to SEQ ID NO: 2685
  source 1..135: mol_type = other DNA

SEQ ID NO: 3387 - DNA, 135 bp, synthetic construct; identical to SEQ ID NO: 2685
  source 1..135: mol_type = other DNA

SEQ ID NO: 3388 - DNA, 144 bp, synthetic construct; identical to SEQ ID NO: 2946
  source 1..144: mol_type = other DNA

SEQ ID NO: 3389 - DNA, 144 bp, synthetic construct; identical to SEQ ID NO: 2948
  source 1..144: mol_type = other DNA

SEQ ID NO: 3390 - DNA, 144 bp, synthetic construct; identical to SEQ ID NO: 2949
  source 1..144: mol_type = other DNA

SEQ ID NO: 3391 - DNA, 141 bp, synthetic construct; identical to SEQ ID NO: 2962
  source 1..141: mol_type = other DNA

SEQ ID NO: 3392 - DNA, 129 bp, synthetic construct; identical to SEQ ID NO: 2699
  source 1..129: mol_type = other DNA

SEQ ID NO: 3393 - DNA, 129 bp, synthetic construct; identical to SEQ ID NO: 2931
  source 1..129: mol_type = other DNA

SEQ ID NO: 3394 - DNA, 150 bp, synthetic construct; identical to SEQ ID NO: 2964
  source 1..150: mol_type = other DNA

SEQ ID NO: 3395 - DNA, 150 bp, synthetic construct; identical to SEQ ID NO: 2965
  source 1..150: mol_type = other DNA

SEQ ID NO: 3396 - DNA, 129 bp, synthetic construct; identical to SEQ ID NO: 2967
  source 1..129: mol_type = other DNA

SEQ ID NO: 3397 - DNA, 129 bp, synthetic construct; identical to SEQ ID NO: 2970
  source 1..129: mol_type = other DNA

SEQ ID NO: 3398 - DNA, 156 bp, synthetic construct; identical to SEQ ID NO: 2694
  source 1..156: mol_type = other DNA

SEQ ID NO: 3399 - DNA, 156 bp, synthetic construct; identical to SEQ ID NO: 2694
  source 1..156: mol_type = other DNA

SEQ ID NO: 3400 - DNA, 150 bp, synthetic construct; identical to SEQ ID NO: 2773
  source 1..150: mol_type = other DNA

SEQ ID NO: 3401 - DNA, 162 bp, synthetic construct; identical to SEQ ID NO: 2978
  source 1..162: mol_type = other DNA

SEQ ID NO: 3402 - DNA, 144 bp, synthetic construct; identical to SEQ ID NO: 2716
  source 1..144: mol_type = other DNA

SEQ ID NO: 3403 - DNA, 144 bp, synthetic construct; identical to SEQ ID NO: 2716
  source 1..144: mol_type = other DNA

SEQ ID NO: 3404 - DNA, 153 bp, synthetic construct; identical to SEQ ID NO: 2848
  source 1..153: mol_type = other DNA

SEQ ID NO: 3405 - DNA, 153 bp, synthetic construct; identical to SEQ ID NO: 2838
  source 1..153: mol_type = other DNA

SEQ ID NO: 3406 - DNA, 153 bp, synthetic construct; identical to SEQ ID NO: 2838
  source 1..153: mol_type = other DNA

SEQ ID NO: 3407 - DNA, 135 bp, synthetic construct; identical to SEQ ID NO: 2983
  source 1..135: mol_type = other DNA

SEQ ID NO: 3408 - protein, 67 aa, synthetic construct
MNIIQVLLTVVTVIGFTKTCGRLDNLLDMLYNVISSVESIMNIIQVLLTVVTVIGFTKTCGRLDNLI

SEQ ID NO: 3409 - DNA, 241 bp, synthetic construct
  source 1..241: mol_type = other DNA
agatatgctgtataatgtaatcagtagcgtggagtcaattatgaatatcatccaagtgttgcttaccgtcgtcacagtgattggtttcaccaagacctgtgggaggcttgacaacctgttagatatgctgtataatgtaatcagtagcgtggagtcaattatgaatatcatccaagtgttgcttaccgtcgtcacagtgattggtttcaccaagaccttgtgggaggcttgacaacctgtt

SEQ ID NO: 3410 - protein, 5 aa, synthetic construct
ICCIM

SEQ ID NO: 3411 - protein, 7 aa, synthetic construct
SVAWSQL

SEQ ID NO: 3412 - protein, 4 aa, synthetic construct
RYAV

SEQ ID NO: 3413 - protein, 6 aa, synthetic construct
RGVNYE

SEQ ID NO: 3414 - protein, 17 aa, synthetic construct
DMLYNVISSVESIMNII

SEQ ID NO: 3415 - protein, 10 aa, synthetic construct
TKTCGRLDNL

SEQ ID NO: 3416 - protein, 41 aa, synthetic construct
MNIIQVLLTVVTVIGFTKTCGRLDNLLDMLLYNVISSVESI

SEQ ID NO: 3417 - protein, 40 aa, synthetic construct
MTEVLFYVLSALRLSSWSGFAWLDNLLEMQYHGSIIVEVR

SEQ ID NO: 3418 - protein, 44 aa, synthetic construct
MRISIRALLAALLVTLGYFTCGAAMGLDSLLGSTYNVSVTLGVP

SEQ ID NO: 3419 - protein, 37 aa, synthetic construct
MVILRFMTMCLSWLCKDKGIDNLLEMIYNVICDGDYT

SEQ ID NO: 3420 - protein, 40 aa, synthetic construct
MKTLFQFMLSICSACLGGVPIGLDNLLEMDYAITITVEVS

SEQ ID NO: 3421 - protein, 39 aa, synthetic construct
MNIIHLLVSLWSVFSEGRWPGVDKLLETLYNVISIMETI

SEQ ID NO: 3422 - DNA, 21 bp, synthetic construct
  source 1..21: mol_type = other DNA
gtaacttagactcaatgacag

SEQ ID NO: 3423 - DNA, 19 bp, synthetic construct
  source 1..19: mol_type = other DNA
caaaaaagactgcattccc

SEQ ID NO: 3424 - protein, 40 aa, synthetic construct
DMLYNVISSVESIMNIIQVLLTVVTVIGFTKTCGRLDNLL

SEQ ID NO: 3425 - protein, 11 aa, synthetic construct
ISSKCCLPSSQ

SEQ ID NO: 3426 - protein, 13 aa, synthetic construct
LVSPRPVGGLTTC

SEQ ID NO: 3427 - protein, 27 aa, synthetic construct
RGVNYEYHPSVAYRRHSDWFHQDLWEA

SEQ ID NO: 3428 - DNA, 121 bp, synthetic construct
  source 1..121: mol_type = other DNA
agatatgctgtataatgtaatcagtagcgtggagtcaattatgaatatcatccaagtgttgcttaccgtcgtcacagtgattggtttcaccaagacctgtgggaggcttgacaacctgtta

SEQ ID NO: 3429 - RNA, 157 nt, synthetic construct
  source 1..157: mol_type = other RNA
gccctaaacaaaggtttaggggtattgtacaggttgtcaagcctcccacagtcttggtgaaaccaatcactgtgacgacggtaagcaacacttggatgatattcataattgactccacgctactgattacattatacagcatatctaacatttgcgg

SEQ ID NO: 3430 - protein, 57 aa, synthetic construct
MNIIQVLLTVVTVIGFTKTCGRLDNLLDMLYNVISSVESIMNIIQVLLTVVTVIGFT

SEQ ID NO: 3431 - protein, 47 aa, synthetic construct
CGRLDNLLDMLYNVISSVESIMNIIQVLLTVVTVIGFTKTCGRLDNL

SEQ ID NO: 3432 - DNA, 139 bp, synthetic construct
  source 1..139: mol_type = other DNA
tgcggtcgctggataatttgctggacatgctgtacaacgtgatctccagcgttgagagcattatgaacatcatccaggtgttactgacggttgttactgttatcgggtttaccaaaacctgtggccgtttagacaacct

SEQ ID NO: 3433 - DNA, 140 bp, synthetic construct
  source 1..140: mol_type = other DNA
tgcggtcgctggataatttgctggacatgctgtacaacgtgatctccagcgttgagagcattatgaacatcatccaggtgttactgacggttgttactgttatcgggtttaccaaaacctgtggccgtttagacaaccct

SEQ ID NO: 3434 - DNA, 140 bp, synthetic construct
  source 1..140: mol_type = other DNA
tgcggtcggctggataatttgctggacatgctgtacaacgtgatctccagcgttgagagcattatgaacatcatccaggtgttactgacggttgttactgttatcgggtttaccaaaacctgtggccgtttagacaacct

SEQ ID NO: 3435 - RNA, 140 nt, synthetic construct
  source 1..140: mol_type = other RNA
ggggtattgtacaggttgtcaagcctcccacaggtcttggtgaaaccaatcactgtgacgacggtaagcaacacttggatgatattcataattgactccacgctactgattacattatacagcatatctaacatttgcgg

SEQ ID NO: 3436 - RNA, 276 nt, synthetic construct
  source 1..276: mol_type = other RNA
gccctaaacaaaggtttaggggtattgtacaggttgtcaagcctcccacaggtcttggtgaaaccaatcactgtgacgacggtaagcaacacttggatgatattcataattgactccacgctactgattacattatacagcatatctaacatttgcggcgaggttcacaatttgtatttaggtactgattgtggatgagaaggttggagaaagaccacttggttaagccggaggatgtgtcctagaattgtcgctattctgtcatcctccggtttt

SEQ ID NO: 3437 - RNA, 281 nt, synthetic construct
  source 1..281: mol_type = other RNA
gccctaaacaaaggtttaggggtattccacaggttgtcaagcctcccacaggtcttggtgaaaccaatcactgtgacgacggtaagcaacacttggatgatattcataattgactccacgctactgattacattatacagcatatctaacatttgcggcgaggttcacaatttgtatttaggtactgattgtggatgagaaggttggagaaagaccacttggttaagccggaggatgtgtcctagaattgtcgctattctgtcatcctccggttttgctaa

SEQ ID NO: 3438 - RNA, 281 nt, synthetic construct
  source 1..281: mol_type = other RNA
gccctaaacaaaggtttaggggtattgtggaggttgtcaagcctcccacaggtcttggtgaaaccaatcactgtgacgacggtaagcaacacttggatgatattcataattgactccacgctactgattacattatacagcatatctaacatttgcggcgaggttcacaatttgtatttaggtactgattgtggatgagaaggttggagaaagaccacttggttaagccggaggatgtgtcctagaattgtcgctattctgtcatcctccggttttgctaa

SEQ ID NO: 3439 - RNA, 281 nt, synthetic construct
  source 1..281: mol_type = other RNA
gccctaaacaaaggtttaggggtattgtacaggttgtcaagcctcccacaggtcttggtgaaaccaatcactgtgacgacggtaagcaacacttggatgatattcataattgactccacgctactgattacattatacagcatatctaggatttgcggcgaggttcacaatttgtatttaggtactgattgtggatgagaaggttggagaaagaccacttggttaagccggaggatgtgtcctagaattgtcgctattctgtcatcctccggttttgctaa

SEQ ID NO: 3440 - RNA, 281 nt, synthetic construct; identical to SEQ ID NO: 851
  source 1..281: mol_type = other RNA

SEQ ID NO: 3441 - RNA, 381 nt, synthetic construct
  source 1..381: mol_type = other RNA
gccctaaacaaaggtttaggggtattgtacaggttgtcaagcctcccacaggtcttggttgctagaggatggaatgaccttaaatcagggacgatattaaacggaacgtccctcaagcgcgagtattgaaccaggcttacgcccaagaacgtagcaagcgaaaccaatcactgtgacgacggtaagcaacacttggatgatattcataattgactccacgctactgattacattatacagcatatctaacatttgcggcgaggttcacaatttgtatttaggtactgattgtggatgagaaggttggagaaagaccacttggttaagccggaggatgtgtcctagaattgtcgctattctgtcatcctccggttttgctaa

SEQ ID NO: 3442 - RNA, 381 nt, synthetic construct
  source 1..381: mol_type = other RNA
gccctaaacaaaggtttaggggtattgtacaggttgtcaagcctcccacaggtcttggtgaaaccaatcactgtgacgacggtaagcaacacttggatgatattcataattgactccacgctactgattactgctagaggatggaatgaccttaaatcagggacgatattaaacggaacgtccctcaagcgcgagtattgaaccaggcttacgcccaagaacgtagcaagcattatacagcatatctaacatttgcggcgaggttcacaatttgtatttaggtactgattgtggatgagaaggttggagaaagaccacttggttaagccggaggatgtgtcctagaattgtcgctattctgtcatcctccggttttgctaa

SEQ ID NO: 3443 - RNA, 531 nt, synthetic construct
  source 1..531: mol_type = other RNA
gccctaaacaaaggtttaggggtattgtacaggttgtcaagcctcccacaggtcttggttgctagaggatggaatgaccttaaatcagggacgatattaaacggaacgtatattcaacgcaatgaagccggaggattggcgtgggaatcgtgcttctgtctaagcaagtaagggtatgaggtcgcaaccgtcccccaagcgtacagggtgcactttgtaacgatttgggagtccagagactcgctgttttcgaaatttgccctcaagcgcgagtattgaaccaggcttacgcccaagaacgtagcaagcgaaaccaatcactgtgacgacggtaagcaacacttggatgatattcataattgactccacgctactgattacattatacagcatatctaacatttgcggcgaggttcacaatttgtatttaggtactgattgtggatgagaaggttggagaaagaccacttggttaagccggaggatgtgtcctagaattgtcgctattctgtcatcctccggttttgctaa

SEQ ID NO: 3444 - RNA, 531 nt, synthetic construct
  source 1..531: mol_type = other RNA
gccctaaacaaaggtttaggggtattgtacaggttgtcaagcctcccacaggtcttggtgaaaccaatcactgtgacgacggtaagcaacacttggatgatattcataattgactccacgctactgattactgctagaggatggaatgaccttaaatcagggacgatattaaacggaacgtatattcaacgcaatgaagccggaggattggcgtgggaatcgtgcttctgtctaagcaagtaagggtatgaggtcgcaaccgtcccccaagcgtacagggtgcactttgtaacgatttgggagtccagagactcgctgttttcgaaatttgccctcaagcgcgagtattgaaccaggcttacgcccaagaacgtagcaagcattatacagcatatctaacatttgcggcgaggttcacaatttgtatttaggtactgattgtggatgagaaggttggagaaagaccacttggttaagccggaggatgtgtcctagaattgtcgctattctgtcatcctccggttttgctaa

SEQ ID NO: 3445 - RNA, 261 nt, synthetic construct
  source 1..261: mol_type = other RNA
gccctaaacaaaggtttaggggtattgtacaggttgtcaagcctcccacaggtcttggtgaaaccaatcactgtgacggatattcataattgactccacgctactgattacattatacagcatatctaacatttgcggcgaggttcacaatttgtatttaggtactgattgtggatgagaaggttggagaaagaccacttggttaagccggaggatgtgtcctagaattgtcgctattctgtcatcctccggttttgctaa

SEQ ID NO: 3446 - RNA, 241 nt, synthetic construct
  source 1..241: mol_type = other RNA
gccctaaacaaaggtttaggggtattgtacaggttgtcaagcctcccacaggtcttggtgaaaccaatattgactccacgctactgattacattatacagcatatctaacatttgcggcgaggttcacaatttgtatttaggtactgattgtggatgagaaggttggagaaagaccacttggttaagccggaggatgtgtcctagaattgtcgctattctgtcatcctccggttttgctaa

SEQ ID NO: 3447 - RNA, 221 nt, synthetic construct
  source 1..221: mol_type = other RNA
gccctaaacaaaggtttaggggtattgtacaggttgtcaagcctcccacaggtcttggcgctactgattacattatacagcatatctaacatttgcggcgaggttcacaatttgtatttaggtactgattgtggatgagaaggttggagaaagaccacttggttaagccggaggatgtgtcctagaattgtcgctattctgtcatcctccggttttgctaa

SEQ ID NO: 3448 - RNA, 201 nt, synthetic construct
  source 1..201: mol_type = other RNA
gccctaaacaaaggtttaggggtattgtacaggttgtcaagcctcccatacattatacagcatatctaacatttgcggcgaggttcacaatttgtatttaggtactgattgtggatgagaaggttggagaaagaccacttggttaagccggaggatgtgtcctagaattgtcgctattctgtcatcctccggttttgctaa

SEQ ID NO: 3449 - RNA, 181 nt, synthetic construct
  source 1..181: mol_type = other RNA
gccctaaacaaaggtttaggggtattgtacaggttgtcagcatatctaacatttgcggcgaggttcacaatttgtatttaggtactgattgtggatgagaaggttggagaaagaccacttggttaagccggaggatgtgtcctagaattgtcgctattctgtcatcctccggttttgctaa

SEQ ID NO: 3450 - RNA, 281 nt, synthetic construct; identical to SEQ ID NO: 860
  source 1..281: mol_type = other RNA

SEQ ID NO: 3451 - RNA, 281 nt, synthetic construct
  source 1..281: mol_type = other RNA
gccctaaacaaaggtttaggggtattgtacaggttgtcaagcctcccacaggtcttggtgaaaccaatcactgtgacgacggtaagcaacacttggatgatattcataattgactccacgctacctaatttttagcgaaacatatctaacatttgcggcgaggttcacaatttgtatttaggtactgattgtggatgagaaggttggagaaagaccacttggttaagccggaggatgtgtcctagaattgtcgctattctgtcatcctccggttttgctaa

SEQ ID NO: 3452 - DNA, 4193 bp, synthetic construct
  source 1..4193: mol_type = other DNA
acacgatataaaaccatctcattgcttgctgggttaactgagttgctgaatttttttctagaatttcgcaaaatttaataggtaaaccttgtttttttaaatttacgatgatataaaaataatgccctaaacaaaggtttaggggtattgtacaggttgtcaagcctcccacaggtcttggtgaaaccaatcactgtgacgacggtaagcaacacttggatgatattcataattgactccacgctactgattacattatacagcatatctaacatttgcggcgaggttcacaatttgtatttaggtactgattgtggatgagaaggttggagaaagaccacttggttaagccggaggatgtgtcctagaattgtcgctattctgtcatcctccggtttttttcattcagggaatataatggactacaaagaccatgacggtgattataaagatcatgacatcgattacaaggatgacgatgacaagggaggaagcggatcgatgaataatgatgattacccatggttcagaaaacgtggttatttgcatttcgatgaacctgtttcattaaaaaaagcggttaaatatgtttcctctccagaaaaaataataaaacattcttttctgccatttttaagctttgaagtaaaatcgtttaaaatcaaaaaagacaaatcaacaaaacaattaagtaaaactgaaaaattaagacctattgcctattcctcacatttggatagtcatatttatgcattttacgcagaatatcttactggacattatgaattattgatccaagaaaacaatttacacgagaacatccttgccttcagatctttaaataaaagcaatatagaatttgccaagagagcatttgatacaattactgaaatgggtgagtgtagcgctgttgcattagatctttctggtttttttgacaatttagatcatcaaattttgaaacaccagtggtgcaaagttattgggactgaagcgttgccgcaagaccattttgccatatacaaaagtataacaagatattctaaagttgataaaaatagagcgtatgagattttaggtatatcaaagaataaccccaagtataatagacgcaagatctgcacccctgttgattttagaaataagattagaaaaaatggtcttattatagttaataattcccaaaaaggtataccccaaggctcgccaattagtgctctactttcaaatatatatatgcttgactttgatattgaaatgagagattacgcgcaggaacgtggtggccattattatcgctattgtgatgatatgctattcattgtaccaactaagtataataaaactctagcaggtgatgtagcccagcggattaagcatcttaaggtagaactcaatactaagaaaactgagattcgagattttatatacaaagacagtaccttagtggcaaatatgcctttacagtatcttgggtttatttttgatgggagtaatatattattacgttcatcttctctcgcaagatattcggaacgaatgaaaagaggtgtccgcttagcaaaagctacaatggacagcaagaataggattagagaaaataaaggtgaagctttaaaagctttatttaagaaaaaattatatgccagatattcacatattggaagaaggaattttttgacttatggttatcgcgccgcgaagatcatgaattcgaaagctataaaaagacagttaaaaccattgcagaaaagattggaaaatgaaatactaaaataaatatttgctggcccgaatcatacagggccacaatacagttgaaaacaagctataataaacaacatctaatttttatataccgcaataactagcataaccccttggggcctctaaacgggtcttgaggggttttttgctgaaacctcaggcatttgagaagcacacggtcacactgcttccggtagtcaataaaccggtaaaccagcaatagacataagcggctatttaacgaccctgccctgaaccgacgaccgggtcgaatttgctttcgaatttctgccattcatccgcttattatcacttattcaggcgtagcaccaggcgtttaagggcaccaataactgccttaaaaaaattacgccccgccctgccactcatcgcaatactgttgtaattcatttaacattctgccgacatggaagccatcacagacggcatgatgaacctgaatcgccagcggcatcagcaccttgtcgccttgcgtataatatttgcccatagtgaaaacgggggcgaagaagttgtccatattggccacgtttaaatcaaaactggtgaaactcacccagggattggctgagacgaaaaacatattctcaataaaccctttagggaaataggccaggttttcaccgtaacacgccacatcttgcgaatatatgtgtagaaactgccggaaatcgtcgtggtattcactccagagcgatgaaaacgtttcagtttgctcatggaaaacggtgtaacaagggtgaacactatcccatatcaccagctcaccgtctttcatcgccatacggaactctggatgagcattcatcaggcgggcaagaatgtgaataaaggccggataaaacttgtgcttatttttctttacggtctttaaaaaggccgtaatatccagctgaacggtctggttataggtacattgagcaactgactgaaatgcctcaaaatgttctttacgatgccattgggatatatcaacggtggtatatccagtgatttttttctccattttagcttccttagctcctgaaaatctcgataactcaaaaaatacgcccggtagtgatcttatttcattatggtgaaagttggaacctcttacgtgccgatcaacgtctcattttcgccaaaagttggcccagggcttcccggtatcaacagggacaccaggatttatttattctgcgaagtgatcttccgtcacaggtatttattcggcgcaaagtgcgtcgggtgatgctgccaacttactgatttagtgtatgatggtgtttttgaggtgctccagtggcttctgtttctatcagctgtccctcctgttcagctactgacggggtggtgcgtaacggcaaaagcaccgccggacatcagcgctagcggagtgtatactggcttactatgttggcactgatgagggtgtcagtgaagtgcttcatgtggcaggagaaaaaaggctgcaccggtgcgtcagcagaatatgtgatacaggatatattccgcttcctcgctcactgactcgctacgctcggtcgttcgactgcggcgagcggaaatggcttacgaacggggcggagatttcctggaagatgccaggaagatacttaacagggaagtgagagggccgcggcaaagccgtttttccataggctccgcccccctgacaagcatcacgaaatctgacgctcaaatcagtggtggcgaaacccgacaggactataaagataccaggcgtttccccctggcggctccctcgtgcgctctcctgttcctgcctttcggtttaccggtgtcattccgctgttatggccgcgtttgtctcattccacgcctgacactcagttccgggtaggcagttcgctccaagctggactgtatgcacgaaccccccgttcagtccgaccgctgcgccttatccggtaactatcgtcttgagtccaacccggaaagacatgcaaaagcaccactggcagcagccactggtaattgatttagaggagttagtcttgaagtcatgcgccggttaaggctaaactgaaaggacaagttttggtgactgcgctcctccaagccagttacctcggttcaaagagttggtagctcagagaaccttcgaaaaaccgccctgcaaggcggttttttcgttttcagagcaagagattacgcgcagaccaaaacgatctcaagaagatcatcttattaatcagataaaatatttctagatttcagtgcaatttatctcttcaaatgtagcacctgaagtcagccccatacgatataagttgtaattctcatgttagtcatgccccgcgcccaccggaaggagctgactgggttgaaggctctcaagggcatcggtcgagatcccggtgcctaatgagtgagctaacttacattaattgcgttgcgca

SEQ ID NO: 3453 - DNA, 4298 bp, synthetic construct
  source 1..4298: mol_type = other DNA
acacgatataaaaccatctcattgcttgctgggttaactgagttgctgaatttttttctagaatttcgcaaaatttaataggtaaaccttgtttttttaaatttacgatgatataaaaataatgccctaaacaaaggtttaggggtattgtacaggttgtcaagcctcccacaggtcttggttgctagaggatggaatgaccttaaatcagggacgatattaaacggaacgtccctcaagcgcgagtattgaaccaggcttacgcccaagaacgtagcaagcgaaaccaatcactgtgacgacggtaagcaacacttggatgatattcataattgactccacgctactgattacattatacagcatatctaacatttgcggcgaggttcacaatttgtatttaggtactgattgtggatgagaaggttggagaaagaccacttggttaagccggaggatgtgtcctagaattgtcgctattctgtcatcctccggttttgctaatttcattcagggaatataatggactacaaagaccatgacggtgattataaagatcatgacatcgattacaaggatgacgatgacaagggaggaagcggatcgatgaataatgatgattacccatggttcagaaaacgtggttatttgcatttcgatgaacctgtttcattaaaaaaagcggttaaatatgtttcctctccagaaaaaataataaaacattcttttctgccatttttaagctttgaagtaaaatcgtttaaaatcaaaaaagacaaatcaacaaaacaattaagtaaaactgaaaaattaagacctattgcctattcctcacatttggatagtcatatttatgcattttacgcagaatatcttactggacattatgaattattgatccaagaaaacaatttacacgagaacatccttgccttcagatctttaaataaaagcaatatagaatttgccaagagagcatttgatacaattactgaaatgggtgagtgtagcgctgttgcattagatctttctggtttttttgacaatttagatcatcaaattttgaaacaccagtggtgcaaagttattgggactgaagcgttgccgcaagaccattttgccatatacaaaagtataacaagatattctaaagttgataaaaatagagcgtatgagattttaggtatatcaaagaataaccccaagtataatagacgcaagatctgcacccctgttgattttagaaataagattagaaaaaatggtcttattatagttaataattcccaaaaaggtataccccaaggctcgccaattagtgctctactttcaaatatatatatgcttgactttgatattgaaatgagagattacgcgcaggaacgtggtggccattattatcgctattgtgatgatatgctattcattgtaccaactaagtataataaaactctagcaggtgatgtagcccagcggattaagcatcttaaggtagaactcaatactaagaaaactgagattcgagattttatatacaaagacagtaccttagtggcaaatatgcctttacagtatcttgggtttatttttgatgggagtaatatattattacgttcatcttctctcgcaagatattcggaacgaatgaaaagaggtgtccgcttagcaaaagctacaatggacagcaagaataggattagagaaaataaaggtgaagctttaaaagctttatttaagaaaaaattatatgccagatattcacatattggaagaaggaattttttgacttatggttatcgcgccgcgaagatcatgaattcgaaagctataaaaagacagttaaaaccattgcagaaaagattggaaaatgaaatactaaaataaatatttgctggcccgaatcatacagggccacaatacagttgaaaacaagctataataaacaacatctaatttttatataccgcaataactagcataaccccttggggcctctaaacgggtcttgaggggttttttgctgaaacctcaggcatttgagaagcacacggtcacactgcttccggtagtcaataaaccggtaaaccagcaatagacataagcggctatttaacgaccctgccctgaaccgacgaccgggtcgaatttgctttcgaatttctgccattcatccgcttattatcacttattcaggcgtagcaccaggcgtttaagggcaccaataactgccttaaaaaaattacgccccgccctgccactcatcgcaatactgttgtaattcatttaacattctgccgacatggaagccatcacagacggcatgatgaacctgaatcgccagcggcatcagcaccttgtcgccttgcgtataatatttgcccatagtgaaaacgggggcgaagaagttgtccatattggccacgtttaaatcaaaactggtgaaactcacccagggattggctgagacgaaaaacatattctcaataaaccctttagggaaataggccaggttttcaccgtaacacgccacatcttgcgaatatatgtgtagaaactgccggaaatcgtcgtggtattcactccagagcgatgaaaacgtttcagtttgctcatggaaaacggtgtaacaagggtgaacactatcccatatcaccagctcaccgtctttcatcgccatacggaactctggatgagcattcatcaggcgggcaagaatgtgaataaaggccggataaaacttgtgcttatttttctttacggtctttaaaaaggccgtaatatccagctgaacggtctggttataggtacattgagcaactgactgaaatgcctcaaaatgttctttacgatgccattgggatatatcaacggtggtatatccagtgatttttttctccattttagcttccttagctcctgaaaatctcgataactcaaaaaatacgcccggtagtgatcttatttcattatggtgaaagttggaacctcttacgtgccgatcaacgtctcattttcgccaaaagttggcccagggcttcccggtatcaacagggacaccaggatttatttattctgcgaagtgatcttccgtcacaggtatttattcggcgcaaagtgcgtcgggtgatgctgccaacttactgatttagtgtatgatggtgtttttgaggtgctccagtggcttctgtttctatcagctgtccctcctgttcagctactgacggggtggtgcgtaacggcaaaagcaccgccggacatcagcgctagcggagtgtatactggcttactatgttggcactgatgagggtgtcagtgaagtgcttcatgtggcaggagaaaaaaggctgcaccggtgcgtcagcagaatatgtgatacaggatatattccgcttcctcgctcactgactcgctacgctcggtcgttcgactgcggcgagcggaaatggcttacgaacggggcggagatttcctggaagatgccaggaagatacttaacagggaagtgagagggccgcggcaaagccgtttttccataggctccgcccccctgacaagcatcacgaaatctgacgctcaaatcagtggtggcgaaacccgacaggactataaagataccaggcgtttccccctggcggctccctcgtgcgctctcctgttcctgcctttcggtttaccggtgtcattccgctgttatggccgcgtttgtctcattccacgcctgacactcagttccgggtaggcagttcgctccaagctggactgtatgcacgaaccccccgttcagtccgaccgctgcgccttatccggtaactatcgtcttgagtccaacccggaaagacatgcaaaagcaccactggcagcagccactggtaattgatttagaggagttagtcttgaagtcatgcgccggttaaggctaaactgaaaggacaagttttggtgactgcgctcctccaagccagttacctcggttcaaagagttggtagctcagagaaccttcgaaaaaccgccctgcaaggcggttttttcgttttcagagcaagagattacgcgcagaccaaaacgatctcaagaagatcatcttattaatcagataaaatatttctagatttcagtgcaatttatctcttcaaatgtagcacctgaagtcagccccatacgatataagttgtaattctcatgttagtcatgccccgcgcccaccggaaggagctgactgggttgaaggctctcaagggcatcggtcgagatcccggtgcctaatgagtgagctaacttacattaattgcgttgcgca

SEQ ID NO: 3454 - DNA, 4298 bp, synthetic construct
  source 1..4298: mol_type = other DNA
acacgatataaaaccatctcattgcttgctgggttaactgagttgctgaatttttttctagaatttcgcaaaatttaataggtaaaccttgtttttttaaatttacgatgatataaaaataatgccctaaacaaaggtttaggggtattgtacaggttgtcaagcctcccacaggtcttggtgaaaccaatcactgtgacgacggtaagcaacacttggatgatattcataattgactccacgctactgattactgctagaggatggaatgaccttaaatcagggacgatattaaacggaacgtccctcaagcgcgagtattgaaccaggcttacgcccaagaacgtagcaagcattatacagcatatctaacatttgcggcgaggttcacaatttgtatttaggtactgattgtggatgagaaggttggagaaagaccacttggttaagccggaggatgtgtcctagaattgtcgctattctgtcatcctccggttttgctaatttcattcagggaatataatggactacaaagaccatgacggtgattataaagatcatgacatcgattacaaggatgacgatgacaagggaggaagcggatcgatgaataatgatgattacccatggttcagaaaacgtggttatttgcatttcgatgaacctgtttcattaaaaaaagcggttaaatatgtttcctctccagaaaaaataataaaacattcttttctgccatttttaagctttgaagtaaaatcgtttaaaatcaaaaaagacaaatcaacaaaacaattaagtaaaactgaaaaattaagacctattgcctattcctcacatttggatagtcatatttatgcattttacgcagaatatcttactggacattatgaattattgatccaagaaaacaatttacacgagaacatccttgccttcagatctttaaataaaagcaatatagaatttgccaagagagcatttgatacaattactgaaatgggtgagtgtagcgctgttgcattagatctttctggtttttttgacaatttagatcatcaaattttgaaacaccagtggtgcaaagttattgggactgaagcgttgccgcaagaccattttgccatatacaaaagtataacaagatattctaaagttgataaaaatagagcgtatgagattttaggtatatcaaagaataaccccaagtataatagacgcaagatctgcacccctgttgattttagaaataagattagaaaaaatggtcttattatagttaataattcccaaaaaggtataccccaaggctcgccaattagtgctctactttcaaatatatatatgcttgactttgatattgaaatgagagattacgcgcaggaacgtggtggccattattatcgctattgtgatgatatgctattcattgtaccaactaagtataataaaactctagcaggtgatgtagcccagcggattaagcatcttaaggtagaactcaatactaagaaaactgagattcgagattttatatacaaagacagtaccttagtggcaaatatgcctttacagtatcttgggtttatttttgatgggagtaatatattattacgttcatcttctctcgcaagatattcggaacgaatgaaaagaggtgtccgcttagcaaaagctacaatggacagcaagaataggattagagaaaataaaggtgaagctttaaaagctttatttaagaaaaaattatatgccagatattcacatattggaagaaggaattttttgacttatggttatcgcgccgcgaagatcatgaattcgaaagctataaaaagacagttaaaaccattgcagaaaagattggaaaatgaaatactaaaataaatatttgctggcccgaatcatacagggccacaatacagttgaaaacaagctataataaacaacatctaatttttatataccgcaataactagcataaccccttggggcctctaaacgggtcttgaggggttttttgctgaaacctcaggcatttgagaagcacacggtcacactgcttccggtagtcaataaaccggtaaaccagcaatagacataagcggctatttaacgaccctgccctgaaccgacgaccgggtcgaatttgctttcgaatttctgccattcatccgcttattatcacttattcaggcgtagcaccaggcgtttaagggcaccaataactgccttaaaaaaattacgccccgccctgccactcatcgcaatactgttgtaattcatttaacattctgccgacatggaagccatcacagacggcatgatgaacctgaatcgccagcggcatcagcaccttgtcgccttgcgtataatatttgcccatagtgaaaacgggggcgaagaagttgtccatattggccacgtttaaatcaaaactggtgaaactcacccagggattggctgagacgaaaaacatattctcaataaaccctttagggaaataggccaggttttcaccgtaacacgccacatcttgcgaatatatgtgtagaaactgccggaaatcgtcgtggtattcactccagagcgatgaaaacgtttcagtttgctcatggaaaacggtgtaacaagggtgaacactatcccatatcaccagctcaccgtctttcatcgccatacggaactctggatgagcattcatcaggcgggcaagaatgtgaataaaggccggataaaacttgtgcttatttttctttacggtctttaaaaaggccgtaatatccagctgaacggtctggttataggtacattgagcaactgactgaaatgcctcaaaatgttctttacgatgccattgggatatatcaacggtggtatatccagtgatttttttctccattttagcttccttagctcctgaaaatctcgataactcaaaaaatacgcccggtagtgatcttatttcattatggtgaaagttggaacctcttacgtgccgatcaacgtctcattttcgccaaaagttggcccagggcttcccggtatcaacagggacaccaggatttatttattctgcgaagtgatcttccgtcacaggtatttattcggcgcaaagtgcgtcgggtgatgctgccaacttactgatttagtgtatgatggtgtttttgaggtgctccagtggcttctgtttctatcagctgtccctcctgttcagctactgacggggtggtgcgtaacggcaaaagcaccgccggacatcagcgctagcggagtgtatactggcttactatgttggcactgatgagggtgtcagtgaagtgcttcatgtggcaggagaaaaaaggctgcaccggtgcgtcagcagaatatgtgatacaggatatattccgcttcctcgctcactgactcgctacgctcggtcgttcgactgcggcgagcggaaatggcttacgaacggggcggagatttcctggaagatgccaggaagatacttaacagggaagtgagagggccgcggcaaagccgtttttccataggctccgcccccctgacaagcatcacgaaatctgacgctcaaatcagtggtggcgaaacccgacaggactataaagataccaggcgtttccccctggcggctccctcgtgcgctctcctgttcctgcctttcggtttaccggtgtcattccgctgttatggccgcgtttgtctcattccacgcctgacactcagttccgggtaggcagttcgctccaagctggactgtatgcacgaaccccccgttcagtccgaccgctgcgccttatccggtaactatcgtcttgagtccaacccggaaagacatgcaaaagcaccactggcagcagccactggtaattgatttagaggagttagtcttgaagtcatgcgccggttaaggctaaactgaaaggacaagttttggtgactgcgctcctccaagccagttacctcggttcaaagagttggtagctcagagaaccttcgaaaaaccgccctgcaaggcggttttttcgttttcagagcaagagattacgcgcagaccaaaacgatctcaagaagatcatcttattaatcagataaaatatttctagatttcagtgcaatttatctcttcaaatgtagcacctgaagtcagccccatacgatataagttgtaattctcatgttagtcatgccccgcgcccaccggaaggagctgactgggttgaaggctctcaagggcatcggtcgagatcccggtgcctaatgagtgagctaacttacattaattgcgttgcgca

SEQ ID NO: 3455 - DNA, 4448 bp, synthetic construct
  source 1..4448: mol_type = other DNA
acacgatataaaaccatctcattgcttgctgggttaactgagttgctgaatttttttctagaatttcgcaaaatttaataggtaaaccttgtttttttaaatttacgatgatataaaaataatgccctaaacaaaggtttaggggtattgtacaggttgtcaagcctcccacaggtcttggttgctagaggatggaatgaccttaaatcagggacgatattaaacggaacgtatattcaacgcaatgaagccggaggattggcgtgggaatcgtgcttctgtctaagcaagtaagggtatgaggtcgcaaccgtcccccaagcgtacagggtgcactttgtaacgatttgggagtccagagactcgctgttttcgaaatttgccctcaagcgcgagtattgaaccaggcttacgcccaagaacgtagcaagcgaaaccaatcactgtgacgacggtaagcaacacttggatgatattcataattgactccacgctactgattacattatacagcatatctaacatttgcggcgaggttcacaatttgtatttaggtactgattgtggatgagaaggttggagaaagaccacttggttaagccggaggatgtgtcctagaattgtcgctattctgtcatcctccggttttgctaatttcattcagggaatataatggactacaaagaccatgacggtgattataaagatcatgacatcgattacaaggatgacgatgacaagggaggaagcggatcgatgaataatgatgattacccatggttcagaaaacgtggttatttgcatttcgatgaacctgtttcattaaaaaaagcggttaaatatgtttcctctccagaaaaaataataaaacattcttttctgccatttttaagctttgaagtaaaatcgtttaaaatcaaaaaagacaaatcaacaaaacaattaagtaaaactgaaaaattaagacctattgcctattcctcacatttggatagtcatatttatgcattttacgcagaatatcttactggacattatgaattattgatccaagaaaacaatttacacgagaacatccttgccttcagatctttaaataaaagcaatatagaatttgccaagagagcatttgatacaattactgaaatgggtgagtgtagcgctgttgcattagatctttctggtttttttgacaatttagatcatcaaattttgaaacaccagtggtgcaaagttattgggactgaagcgttgccgcaagaccattttgccatatacaaaagtataacaagatattctaaagttgataaaaatagagcgtatgagattttaggtatatcaaagaataaccccaagtataatagacgcaagatctgcacccctgttgattttagaaataagattagaaaaaatggtcttattatagttaataattcccaaaaaggtataccccaaggctcgccaattagtgctctactttcaaatatatatatgcttgactttgatattgaaatgagagattacgcgcaggaacgtggtggccattattatcgctattgtgatgatatgctattcattgtaccaactaagtataataaaactctagcaggtgatgtagcccagcggattaagcatcttaaggtagaactcaatactaagaaaactgagattcgagattttatatacaaagacagtaccttagtggcaaatatgcctttacagtatcttgggtttatttttgatgggagtaatatattattacgttcatcttctctcgcaagatattcggaacgaatgaaaagaggtgtccgcttagcaaaagctacaatggacagcaagaataggattagagaaaataaaggtgaagctttaaaagctttatttaagaaaaaattatatgccagatattcacatattggaagaaggaattttttgacttatggttatcgcgccgcgaagatcatgaattcgaaagctataaaaagacagttaaaaccattgcagaaaagattggaaaatgaaatactaaaataaatatttgctggcccgaatcatacagggccacaatacagttgaaaacaagctataataaacaacatctaatttttatataccgcaataactagcataaccccttggggcctctaaacgggtcttgaggggttttttgctgaaacctcaggcatttgagaagcacacggtcacactgcttccggtagtcaataaaccggtaaaccagcaatagacataagcggctatttaacgaccctgccctgaaccgacgaccgggtcgaatttgctttcgaatttctgccattcatccgcttattatcacttattcaggcgtagcaccaggcgtttaagggcaccaataactgccttaaaaaaattacgccccgccctgccactcatcgcaatactgttgtaattcatttaacattctgccgacatggaagccatcacagacggcatgatgaacctgaatcgccagcggcatcagcaccttgtcgccttgcgtataatatttgcccatagtgaaaacgggggcgaagaagttgtccatattggccacgtttaaatcaaaactggtgaaactcacccagggattggctgagacgaaaaacatattctcaataaaccctttagggaaataggccaggttttcaccgtaacacgccacatcttgcgaatatatgtgtagaaactgccggaaatcgtcgtggtattcactccagagcgatgaaaacgtttcagtttgctcatggaaaacggtgtaacaagggtgaacactatcccatatcaccagctcaccgtctttcatcgccatacggaactctggatgagcattcatcaggcgggcaagaatgtgaataaaggccggataaaacttgtgcttatttttctttacggtctttaaaaaggccgtaatatccagctgaacggtctggttataggtacattgagcaactgactgaaatgcctcaaaatgttctttacgatgccattgggatatatcaacggtggtatatccagtgatttttttctccattttagcttccttagctcctgaaaatctcgataactcaaaaaatacgcccggtagtgatcttatttcattatggtgaaagttggaacctcttacgtgccgatcaacgtctcattttcgccaaaagttggcccagggcttcccggtatcaacagggacaccaggatttatttattctgcgaagtgatcttccgtcacaggtatttattcggcgcaaagtgcgtcgggtgatgctgccaacttactgatttagtgtatgatggtgtttttgaggtgctccagtggcttctgtttctatcagctgtccctcctgttcagctactgacggggtggtgcgtaacggcaaaagcaccgccggacatcagcgctagcggagtgtatactggcttactatgttggcactgatgagggtgtcagtgaagtgcttcatgtggcaggagaaaaaaggctgcaccggtgcgtcagcagaatatgtgatacaggatatattccgcttcctcgctcactgactcgctacgctcggtcgttcgactgcggcgagcggaaatggcttacgaacggggcggagatttcctggaagatgccaggaagatacttaacagggaagtgagagggccgcggcaaagccgtttttccataggctccgcccccctgacaagcatcacgaaatctgacgctcaaatcagtggtggcgaaacccgacaggactataaagataccaggcgtttccccctggcggctccctcgtgcgctctcctgttcctgcctttcggtttaccggtgtcattccgctgttatggccgcgtttgtctcattccacgcctgacactcagttccgggtaggcagttcgctccaagctggactgtatgcacgaaccccccgttcagtccgaccgctgcgccttatccggtaactatcgtcttgagtccaacccggaaagacatgcaaaagcaccactggcagcagccactggtaattgatttagaggagttagtcttgaagtcatgcgccggttaaggctaaactgaaaggacaagttttggtgactgcgctcctccaagccagttacctcggttcaaagagttggtagctcagagaaccttcgaaaaaccgccctgcaaggcggttttttcgttttcagagcaagagattacgcgcagaccaaaacgatctcaagaagatcatcttattaatcagataaaatatttctagatttcagtgcaatttatctcttcaaatgtagcacctgaagtcagccccatacgatataagttgtaattctcatgttagtcatgccccgcgcccaccggaaggagctgactgggttgaaggctctcaagggcatcggtcgagatcccggtgcctaatgagtgagctaacttacattaattgcgttgcgca

SEQ ID NO: 3456 - DNA, 4448 bp, synthetic construct
  source 1..4448: mol_type = other DNA
acacgatataaaaccatctcattgcttgctgggttaactgagttgctgaatttttttctagaatttcgcaaaatttaataggtaaaccttgtttttttaaatttacgatgatataaaaataatgccctaaacaaaggtttaggggtattgtacaggttgtcaagcctcccacaggtcttggtgaaaccaatcactgtgacgacggtaagcaacacttggatgatattcataattgactccacgctactgattactgctagaggatggaatgaccttaaatcagggacgatattaaacggaacgtatattcaacgcaatgaagccggaggattggcgtgggaatcgtgcttctgtctaagcaagtaagggtatgaggtcgcaaccgtcccccaagcgtacagggtgcactttgtaacgatttgggagtccagagactcgctgttttcgaaatttgccctcaagcgcgagtattgaaccaggcttacgcccaagaacgtagcaagcattatacagcatatctaacatttgcggcgaggttcacaatttgtatttaggtactgattgtggatgagaaggttggagaaagaccacttggttaagccggaggatgtgtcctagaattgtcgctattctgtcatcctccggttttgctaatttcattcagggaatataatggactacaaagaccatgacggtgattataaagatcatgacatcgattacaaggatgacgatgacaagggaggaagcggatcgatgaataatgatgattacccatggttcagaaaacgtggttatttgcatttcgatgaacctgtttcattaaaaaaagcggttaaatatgtttcctctccagaaaaaataataaaacattcttttctgccatttttaagctttgaagtaaaatcgtttaaaatcaaaaaagacaaatcaacaaaacaattaagtaaaactgaaaaattaagacctattgcctattcctcacatttggatagtcatatttatgcattttacgcagaatatcttactggacattatgaattattgatccaagaaaacaatttacacgagaacatccttgccttcagatctttaaataaaagcaatatagaatttgccaagagagcatttgatacaattactgaaatgggtgagtgtagcgctgttgcattagatctttctggtttttttgacaatttagatcatcaaattttgaaacaccagtggtgcaaagttattgggactgaagcgttgccgcaagaccattttgccatatacaaaagtataacaagatattctaaagttgataaaaatagagcgtatgagattttaggtatatcaaagaataaccccaagtataatagacgcaagatctgcacccctgttgattttagaaataagattagaaaaaatggtcttattatagttaataattcccaaaaaggtataccccaaggctcgccaattagtgctctactttcaaatatatatatgcttgactttgatattgaaatgagagattacgcgcaggaacgtggtggccattattatcgctattgtgatgatatgctattcattgtaccaactaagtataataaaactctagcaggtgatgtagcccagcggattaagcatcttaaggtagaactcaatactaagaaaactgagattcgagattttatatacaaagacagtaccttagtggcaaatatgcctttacagtatcttgggtttatttttgatgggagtaatatattattacgttcatcttctctcgcaagatattcggaacgaatgaaaagaggtgtccgcttagcaaaagctacaatggacagcaagaataggattagagaaaataaaggtgaagctttaaaagctttatttaagaaaaaattatatgccagatattcacatattggaagaaggaattttttgacttatggttatcgcgccgcgaagatcatgaattcgaaagctataaaaagacagttaaaaccattgcagaaaagattggaaaatgaaatactaaaataaatatttgctggcccgaatcatacagggccacaatacagttgaaaacaagctataataaacaacatctaatttttatataccgcaataactagcataaccccttggggcctctaaacgggtcttgaggggttttttgctgaaacctcaggcatttgagaagcacacggtcacactgcttccggtagtcaataaaccggtaaaccagcaatagacataagcggctatttaacgaccctgccctgaaccgacgaccgggtcgaatttgctttcgaatttctgccattcatccgcttattatcacttattcaggcgtagcaccaggcgtttaagggcaccaataactgccttaaaaaaattacgccccgccctgccactcatcgcaatactgttgtaattcatttaacattctgccgacatggaagccatcacagacggcatgatgaacctgaatcgccagcggcatcagcaccttgtcgccttgcgtataatatttgcccatagtgaaaacgggggcgaagaagttgtccatattggccacgtttaaatcaaaactggtgaaactcacccagggattggctgagacgaaaaacatattctcaataaaccctttagggaaataggccaggttttcaccgtaacacgccacatcttgcgaatatatgtgtagaaactgccggaaatcgtcgtggtattcactccagagcgatgaaaacgtttcagtttgctcatggaaaacggtgtaacaagggtgaacactatcccatatcaccagctcaccgtctttcatcgccatacggaactctggatgagcattcatcaggcgggcaagaatgtgaataaaggccggataaaacttgtgcttatttttctttacggtctttaaaaaggccgtaatatccagctgaacggtctggttataggtacattgagcaactgactgaaatgcctcaaaatgttctttacgatgccattgggatatatcaacggtggtatatccagtgatttttttctccattttagcttccttagctcctgaaaatctcgataactcaaaaaatacgcccggtagtgatcttatttcattatggtgaaagttggaacctcttacgtgccgatcaacgtctcattttcgccaaaagttggcccagggcttcccggtatcaacagggacaccaggatttatttattctgcgaagtgatcttccgtcacaggtatttattcggcgcaaagtgcgtcgggtgatgctgccaacttactgatttagtgtatgatggtgtttttgaggtgctccagtggcttctgtttctatcagctgtccctcctgttcagctactgacggggtggtgcgtaacggcaaaagcaccgccggacatcagcgctagcggagtgtatactggcttactatgttggcactgatgagggtgtcagtgaagtgcttcatgtggcaggagaaaaaaggctgcaccggtgcgtcagcagaatatgtgatacaggatatattccgcttcctcgctcactgactcgctacgctcggtcgttcgactgcggcgagcggaaatggcttacgaacggggcggagatttcctggaagatgccaggaagatacttaacagggaagtgagagggccgcggcaaagccgtttttccataggctccgcccccctgacaagcatcacgaaatctgacgctcaaatcagtggtggcgaaacccgacaggactataaagataccaggcgtttccccctggcggctccctcgtgcgctctcctgttcctgcctttcggtttaccggtgtcattccgctgttatggccgcgtttgtctcattccacgcctgacactcagttccgggtaggcagttcgctccaagctggactgtatgcacgaaccccccgttcagtccgaccgctgcgccttatccggtaactatcgtcttgagtccaacccggaaagacatgcaaaagcaccactggcagcagccactggtaattgatttagaggagttagtcttgaagtcatgcgccggttaaggctaaactgaaaggacaagttttggtgactgcgctcctccaagccagttacctcggttcaaagagttggtagctcagagaaccttcgaaaaaccgccctgcaaggcggttttttcgttttcagagcaagagattacgcgcagaccaaaacgatctcaagaagatcatcttattaatcagataaaatatttctagatttcagtgcaatttatctcttcaaatgtagcacctgaagtcagccccatacgatataagttgtaattctcatgttagtcatgccccgcgcccaccggaaggagctgactgggttgaaggctctcaagggcatcggtcgagatcccggtgcctaatgagtgagctaacttacattaattgcgttgcgca

SEQ ID NO: 3457 - DNA, 4178 bp, synthetic construct
  source 1..4178: mol_type = other DNA
acacgatataaaaccatctcattgcttgctgggttaactgagttgctgaatttttttctagaatttcgcaaaatttaataggtaaaccttgtttttttaaatttacgatgatataaaaataatgccctaaacaaaggtttaggggtattgtacaggttgtcaagcctcccacaggtcttggtgaaaccaatcactgtgacggatattcataattgactccacgctactgattacattatacagcatatctaacatttgcggcgaggttcacaatttgtatttaggtactgattgtggatgagaaggttggagaaagaccacttggttaagccggaggatgtgtcctagaattgtcgctattctgtcatcctccggttttgctaatttcattcagggaatataatggactacaaagaccatgacggtgattataaagatcatgacatcgattacaaggatgacgatgacaagggaggaagcggatcgatgaataatgatgattacccatggttcagaaaacgtggttatttgcatttcgatgaacctgtttcattaaaaaaagcggttaaatatgtttcctctccagaaaaaataataaaacattcttttctgccatttttaagctttgaagtaaaatcgtttaaaatcaaaaaagacaaatcaacaaaacaattaagtaaaactgaaaaattaagacctattgcctattcctcacatttggatagtcatatttatgcattttacgcagaatatcttactggacattatgaattattgatccaagaaaacaatttacacgagaacatccttgccttcagatctttaaataaaagcaatatagaatttgccaagagagcatttgatacaattactgaaatgggtgagtgtagcgctgttgcattagatctttctggtttttttgacaatttagatcatcaaattttgaaacaccagtggtgcaaagttattgggactgaagcgttgccgcaagaccattttgccatatacaaaagtataacaagatattctaaagttgataaaaatagagcgtatgagattttaggtatatcaaagaataaccccaagtataatagacgcaagatctgcacccctgttgattttagaaataagattagaaaaaatggtcttattatagttaataattcccaaaaaggtataccccaaggctcgccaattagtgctctactttcaaatatatatatgcttgactttgatattgaaatgagagattacgcgcaggaacgtggtggccattattatcgctattgtgatgatatgctattcattgtaccaactaagtataataaaactctagcaggtgatgtagcccagcggattaagcatcttaaggtagaactcaatactaagaaaactgagattcgagattttatatacaaagacagtaccttagtggcaaatatgcctttacagtatcttgggtttatttttgatgggagtaatatattattacgttcatcttctctcgcaagatattcggaacgaatgaaaagaggtgtccgcttagcaaaagctacaatggacagcaagaataggattagagaaaataaaggtgaagctttaaaagctttatttaagaaaaaattatatgccagatattcacatattggaagaaggaattttttgacttatggttatcgcgccgcgaagatcatgaattcgaaagctataaaaagacagttaaaaccattgcagaaaagattggaaaatgaaatactaaaataaatatttgctggcccgaatcatacagggccacaatacagttgaaaacaagctataataaacaacatctaatttttatataccgcaataactagcataaccccttggggcctctaaacgggtcttgaggggttttttgctgaaacctcaggcatttgagaagcacacggtcacactgcttccggtagtcaataaaccggtaaaccagcaatagacataagcggctatttaacgaccctgccctgaaccgacgaccgggtcgaatttgctttcgaatttctgccattcatccgcttattatcacttattcaggcgtagcaccaggcgtttaagggcaccaataactgccttaaaaaaattacgccccgccctgccactcatcgcaatactgttgtaattcatttaacattctgccgacatggaagccatcacagacggcatgatgaacctgaatcgccagcggcatcagcaccttgtcgccttgcgtataatatttgcccatagtgaaaacgggggcgaagaagttgtccatattggccacgtttaaatcaaaactggtgaaactcacccagggattggctgagacgaaaaacatattctcaataaaccctttagggaaataggccaggttttcaccgtaacacgccacatcttgcgaatatatgtgtagaaactgccggaaatcgtcgtggtattcactccagagcgatgaaaacgtttcagtttgctcatggaaaacggtgtaacaagggtgaacactatcccatatcaccagctcaccgtctttcatcgccatacggaactctggatgagcattcatcaggcgggcaagaatgtgaataaaggccggataaaacttgtgcttatttttctttacggtctttaaaaaggccgtaatatccagctgaacggtctggttataggtacattgagcaactgactgaaatgcctcaaaatgttctttacgatgccattgggatatatcaacggtggtatatccagtgatttttttctccattttagcttccttagctcctgaaaatctcgataactcaaaaaatacgcccggtagtgatcttatttcattatggtgaaagttggaacctcttacgtgccgatcaacgtctcattttcgccaaaagttggcccagggcttcccggtatcaacagggacaccaggatttatttattctgcgaagtgatcttccgtcacaggtatttattcggcgcaaagtgcgtcgggtgatgctgccaacttactgatttagtgtatgatggtgtttttgaggtgctccagtggcttctgtttctatcagctgtccctcctgttcagctactgacggggtggtgcgtaacggcaaaagcaccgccggacatcagcgctagcggagtgtatactggcttactatgttggcactgatgagggtgtcagtgaagtgcttcatgtggcaggagaaaaaaggctgcaccggtgcgtcagcagaatatgtgatacaggatatattccgcttcctcgctcactgactcgctacgctcggtcgttcgactgcggcgagcggaaatggcttacgaacggggcggagatttcctggaagatgccaggaagatacttaacagggaagtgagagggccgcggcaaagccgtttttccataggctccgcccccctgacaagcatcacgaaatctgacgctcaaatcagtggtggcgaaacccgacaggactataaagataccaggcgtttccccctggcggctccctcgtgcgctctcctgttcctgcctttcggtttaccggtgtcattccgctgttatggccgcgtttgtctcattccacgcctgacactcagttccgggtaggcagttcgctccaagctggactgtatgcacgaaccccccgttcagtccgaccgctgcgccttatccggtaactatcgtcttgagtccaacccggaaagacatgcaaaagcaccactggcagcagccactggtaattgatttagaggagttagtcttgaagtcatgcgccggttaaggctaaactgaaaggacaagttttggtgactgcgctcctccaagccagttacctcggttcaaagagttggtagctcagagaaccttcgaaaaaccgccctgcaaggcggttttttcgttttcagagcaagagattacgcgcagaccaaaacgatctcaagaagatcatcttattaatcagataaaatatttctagatttcagtgcaatttatctcttcaaatgtagcacctgaagtcagccccatacgatataagttgtaattctcatgttagtcatgccccgcgcccaccggaaggagctgactgggttgaaggctctcaagggcatcggtcgagatcccggtgcctaatgagtgagctaacttacattaattgcgttgcgca

SEQ ID NO: 3458 - DNA, 4158 bp, synthetic construct
  source 1..4158: mol_type = other DNA
acacgatataaaaccatctcattgcttgctgggttaactgagttgctgaatttttttctagaatttcgcaaaatttaataggtaaaccttgtttttttaaatttacgatgatataaaaataatgccctaaacaaaggtttaggggtattgtacaggttgtcaagcctcccacaggtcttggtgaaaccaatattgactccacgctactgattacattatacagcatatctaacatttgcggcgaggttcacaatttgtatttaggtactgattgtggatgagaaggttggagaaagaccacttggttaagccggaggatgtgtcctagaattgtcgctattctgtcatcctccggttttgctaatttcattcagggaatataatggactacaaagaccatgacggtgattataaagatcatgacatcgattacaaggatgacgatgacaagggaggaagcggatcgatgaataatgatgattacccatggttcagaaaacgtggttatttgcatttcgatgaacctgtttcattaaaaaaagcggttaaatatgtttcctctccagaaaaaataataaaacattcttttctgccatttttaagctttgaagtaaaatcgtttaaaatcaaaaaagacaaatcaacaaaacaattaagtaaaactgaaaaattaagacctattgcctattcctcacatttggatagtcatatttatgcattttacgcagaatatcttactggacattatgaattattgatccaagaaaacaatttacacgagaacatccttgccttcagatctttaaataaaagcaatatagaatttgccaagagagcatttgatacaattactgaaatgggtgagtgtagcgctgttgcattagatctttctggtttttttgacaatttagatcatcaaattttgaaacaccagtggtgcaaagttattgggactgaagcgttgccgcaagaccattttgccatatacaaaagtataacaagatattctaaagttgataaaaatagagcgtatgagattttaggtatatcaaagaataaccccaagtataatagacgcaagatctgcacccctgttgattttagaaataagattagaaaaaatggtcttattatagttaataattcccaaaaaggtataccccaaggctcgccaattagtgctctactttcaaatatatatatgcttgactttgatattgaaatgagagattacgcgcaggaacgtggtggccattattatcgctattgtgatgatatgctattcattgtaccaactaagtataataaaactctagcaggtgatgtagcccagcggattaagcatcttaaggtagaactcaatactaagaaaactgagattcgagattttatatacaaagacagtaccttagtggcaaatatgcctttacagtatcttgggtttatttttgatgggagtaatatattattacgttcatcttctctcgcaagatattcggaacgaatgaaaagaggtgtccgcttagcaaaagctacaatggacagcaagaataggattagagaaaataaaggtgaagctttaaaagctttatttaagaaaaaattatatgccagatattcacatattggaagaaggaattttttgacttatggttatcgcgccgcgaagatcatgaattcgaaagctataaaaagacagttaaaaccattgcagaaaagattggaaaatgaaatactaaaataaatatttgctggcccgaatcatacagggccacaatacagttgaaaacaagctataataaacaacatctaatttttatataccgcaataactagcataaccccttggggcctctaaacgggtcttgaggggttttttgctgaaacctcaggcatttgagaagcacacggtcacactgcttccggtagtcaataaaccggtaaaccagcaatagacataagcggctatttaacgaccctgccctgaaccgacgaccgggtcgaatttgctttcgaatttctgccattcatccgcttattatcacttattcaggcgtagcaccaggcgtttaagggcaccaataactgccttaaaaaaattacgccccgccctgccactcatcgcaatactgttgtaattcatttaacattctgccgacatggaagccatcacagacggcatgatgaacctgaatcgccagcggcatcagcaccttgtcgccttgcgtataatatttgcccatagtgaaaacgggggcgaagaagttgtccatattggccacgtttaaatcaaaactggtgaaactcacccagggattggctgagacgaaaaacatattctcaataaaccctttagggaaataggccaggttttcaccgtaacacgccacatcttgcgaatatatgtgtagaaactgccggaaatcgtcgtggtattcactccagagcgatgaaaacgtttcagtttgctcatggaaaacggtgtaacaagggtgaacactatcccatatcaccagctcaccgtctttcatcgccatacggaactctggatgagcattcatcaggcgggcaagaatgtgaataaaggccggataaaacttgtgcttatttttctttacggtctttaaaaaggccgtaatatccagctgaacggtctggttataggtacattgagcaactgactgaaatgcctcaaaatgttctttacgatgccattgggatatatcaacggtggtatatccagtgatttttttctccattttagcttccttagctcctgaaaatctcgataactcaaaaaatacgcccggtagtgatcttatttcattatggtgaaagttggaacctcttacgtgccgatcaacgtctcattttcgccaaaagttggcccagggcttcccggtatcaacagggacaccaggatttatttattctgcgaagtgatcttccgtcacaggtatttattcggcgcaaagtgcgtcgggtgatgctgccaacttactgatttagtgtatgatggtgtttttgaggtgctccagtggcttctgtttctatcagctgtccctcctgttcagctactgacggggtggtgcgtaacggcaaaagcaccgccggacatcagcgctagcggagtgtatactggcttactatgttggcactgatgagggtgtcagtgaagtgcttcatgtggcaggagaaaaaaggctgcaccggtgcgtcagcagaatatgtgatacaggatatattccgcttcctcgctcactgactcgctacgctcggtcgttcgactgcggcgagcggaaatggcttacgaacggggcggagatttcctggaagatgccaggaagatacttaacagggaagtgagagggccgcggcaaagccgtttttccataggctccgcccccctgacaagcatcacgaaatctgacgctcaaatcagtggtggcgaaacccgacaggactataaagataccaggcgtttccccctggcggctccctcgtgcgctctcctgttcctgcctttcggtttaccggtgtcattccgctgttatggccgcgtttgtctcattccacgcctgacactcagttccgggtaggcagttcgctccaagctggactgtatgcacgaaccccccgttcagtccgaccgctgcgccttatccggtaactatcgtcttgagtccaacccggaaagacatgcaaaagcaccactggcagcagccactggtaattgatttagaggagttagtcttgaagtcatgcgccggttaaggctaaactgaaaggacaagttttggtgactgcgctcctccaagccagttacctcggttcaaagagttggtagctcagagaaccttcgaaaaaccgccctgcaaggcggttttttcgttttcagagcaagagattacgcgcagaccaaaacgatctcaagaagatcatcttattaatcagataaaatatttctagatttcagtgcaatttatctcttcaaatgtagcacctgaagtcagccccatacgatataagttgtaattctcatgttagtcatgccccgcgcccaccggaaggagctgactgggttgaaggctctcaagggcatcggtcgagatcccggtgcctaatgagtgagctaacttacattaattgcgttgcgca

SEQ ID NO: 3459 - DNA, 4138 bp, synthetic construct
  source 1..4138: mol_type = other DNA
acacgatataaaaccatctcattgcttgctgggttaactgagttgctgaatttttttctagaatttcgcaaaatttaataggtaaaccttgtttttttaaatttacgatgatataaaaataatgccctaaacaaaggtttaggggtattgtacaggttgtcaagcctcccacaggtcttggcgctactgattacattatacagcatatctaacatttgcggcgaggttcacaatttgtatttaggtactgattgtggatgagaaggttggagaaagaccacttggttaagccggaggatgtgtcctagaattgtcgctattctgtcatcctccggttttgctaatttcattcagggaatataatggactacaaagaccatgacggtgattataaagatcatgacatcgattacaaggatgacgatgacaagggaggaagcggatcgatgaataatgatgattacccatggttcagaaaacgtggttatttgcatttcgatgaacctgtttcattaaaaaaagcggttaaatatgtttcctctccagaaaaaataataaaacattcttttctgccatttttaagctttgaagtaaaatcgtttaaaatcaaaaaagacaaatcaacaaaacaattaagtaaaactgaaaaattaagacctattgcctattcctcacatttggatagtcatatttatgcattttacgcagaatatcttactggacattatgaattattgatccaagaaaacaatttacacgagaacatccttgccttcagatctttaaataaaagcaatatagaatttgccaagagagcatttgatacaattactgaaatgggtgagtgtagcgctgttgcattagatctttctggtttttttgacaatttagatcatcaaattttgaaacaccagtggtgcaaagttattgggactgaagcgttgccgcaagaccattttgccatatacaaaagtataacaagatattctaaagttgataaaaatagagcgtatgagattttaggtatatcaaagaataaccccaagtataatagacgcaagatctgcacccctgttgattttagaaataagattagaaaaaatggtcttattatagttaataattcccaaaaaggtataccccaaggctcgccaattagtgctctactttcaaatatatatatgcttgactttgatattgaaatgagagattacgcgcaggaacgtggtggccattattatcgctattgtgatgatatgctattcattgtaccaactaagtataataaaactctagcaggtgatgtagcccagcggattaagcatcttaaggtagaactcaatactaagaaaactgagattcgagattttatatacaaagacagtaccttagtggcaaatatgcctttacagtatcttgggtttatttttgatgggagtaatatattattacgttcatcttctctcgcaagatattcggaacgaatgaaaagaggtgtccgcttagcaaaagctacaatggacagcaagaataggattagagaaaataaaggtgaagctttaaaagctttatttaagaaaaaattatatgccagatattcacatattggaagaaggaattttttgacttatggttatcgcgccgcgaagatcatgaattcgaaagctataaaaagacagttaaaaccattgcagaaaagattggaaaatgaaatactaaaataaatatttgctggcccgaatcatacagggccacaatacagttgaaaacaagctataataaacaacatctaatttttatataccgcaataactagcataaccccttggggcctctaaacgggtcttgaggggttttttgctgaaacctcaggcatttgagaagcacacggtcacactgcttccggtagtcaataaaccggtaaaccagcaatagacataagcggctatttaacgaccctgccctgaaccgacgaccgggtcgaatttgctttcgaatttctgccattcatccgcttattatcacttattcaggcgtagcaccaggcgtttaagggcaccaataactgccttaaaaaaattacgccccgccctgccactcatcgcaatactgttgtaattcatttaacattctgccgacatggaagccatcacagacggcatgatgaacctgaatcgccagcggcatcagcaccttgtcgccttgcgtataatatttgcccatagtgaaaacgggggcgaagaagttgtccatattggccacgtttaaatcaaaactggtgaaactcacccagggattggctgagacgaaaaacatattctcaataaaccctttagggaaataggccaggttttcaccgtaacacgccacatcttgcgaatatatgtgtagaaactgccggaaatcgtcgtggtattcactccagagcgatgaaaacgtttcagtttgctcatggaaaacggtgtaacaagggtgaacactatcccatatcaccagctcaccgtctttcatcgccatacggaactctggatgagcattcatcaggcgggcaagaatgtgaataaaggccggataaaacttgtgcttatttttctttacggtctttaaaaaggccgtaatatccagctgaacggtctggttataggtacattgagcaactgactgaaatgcctcaaaatgttctttacgatgccattgggatatatcaacggtggtatatccagtgatttttttctccattttagcttccttagctcctgaaaatctcgataactcaaaaaatacgcccggtagtgatcttatttcattatggtgaaagttggaacctcttacgtgccgatcaacgtctcattttcgccaaaagttggcccagggcttcccggtatcaacagggacaccaggatttatttattctgcgaagtgatcttccgtcacaggtatttattcggcgcaaagtgcgtcgggtgatgctgccaacttactgatttagtgtatgatggtgtttttgaggtgctccagtggcttctgtttctatcagctgtccctcctgttcagctactgacggggtggtgcgtaacggcaaaagcaccgccggacatcagcgctagcggagtgtatactggcttactatgttggcactgatgagggtgtcagtgaagtgcttcatgtggcaggagaaaaaaggctgcaccggtgcgtcagcagaatatgtgatacaggatatattccgcttcctcgctcactgactcgctacgctcggtcgttcgactgcggcgagcggaaatggcttacgaacggggcggagatttcctggaagatgccaggaagatacttaacagggaagtgagagggccgcggcaaagccgtttttccataggctccgcccccctgacaagcatcacgaaatctgacgctcaaatcagtggtggcgaaacccgacaggactataaagataccaggcgtttccccctggcggctccctcgtgcgctctcctgttcctgcctttcggtttaccggtgtcattccgctgttatggccgcgtttgtctcattccacgcctgacactcagttccgggtaggcagttcgctccaagctggactgtatgcacgaaccccccgttcagtccgaccgctgcgccttatccggtaactatcgtcttgagtccaacccggaaagacatgcaaaagcaccactggcagcagccactggtaattgatttagaggagttagtcttgaagtcatgcgccggttaaggctaaactgaaaggacaagttttggtgactgcgctcctccaagccagttacctcggttcaaagagttggtagctcagagaaccttcgaaaaaccgccctgcaaggcggttttttcgttttcagagcaagagattacgcgcagaccaaaacgatctcaagaagatcatcttattaatcagataaaatatttctagatttcagtgcaatttatctcttcaaatgtagcacctgaagtcagccccatacgatataagttgtaattctcatgttagtcatgccccgcgcccaccggaaggagctgactgggttgaaggctctcaagggcatcggtcgagatcccggtgcctaatgagtgagctaacttacattaattgcgttgcgca

SEQ ID NO: 3460 - DNA, 4118 bp, synthetic construct
  source 1..4118: mol_type = other DNA
acacgatataaaaccatctcattgcttgctgggttaactgagttgctgaatttttttctagaatttcgcaaaatttaataggtaaaccttgtttttttaaatttacgatgatataaaaataatgccctaaacaaaggtttaggggtattgtacaggttgtcaagcctcccatacattatacagcatatctaacatttgcggcgaggttcacaatttgtatttaggtactgattgtggatgagaaggttggagaaagaccacttggttaagccggaggatgtgtcctagaattgtcgctattctgtcatcctccggttttgctaatttcattcagggaatataatggactacaaagaccatgacggtgattataaagatcatgacatcgattacaaggatgacgatgacaagggaggaagcggatcgatgaataatgatgattacccatggttcagaaaacgtggttatttgcatttcgatgaacctgtttcattaaaaaaagcggttaaatatgtttcctctccagaaaaaataataaaacattcttttctgccatttttaagctttgaagtaaaatcgtttaaaatcaaaaaagacaaatcaacaaaacaattaagtaaaactgaaaaattaagacctattgcctattcctcacatttggatagtcatatttatgcattttacgcagaatatcttactggacattatgaattattgatccaagaaaacaatttacacgagaacatccttgccttcagatctttaaataaaagcaatatagaatttgccaagagagcatttgatacaattactgaaatgggtgagtgtagcgctgttgcattagatctttctggtttttttgacaatttagatcatcaaattttgaaacaccagtggtgcaaagttattgggactgaagcgttgccgcaagaccattttgccatatacaaaagtataacaagatattctaaagttgataaaaatagagcgtatgagattttaggtatatcaaagaataaccccaagtataatagacgcaagatctgcacccctgttgattttagaaataagattagaaaaaatggtcttattatagttaataattcccaaaaaggtataccccaaggctcgccaattagtgctctactttcaaatatatatatgcttgactttgatattgaaatgagagattacgcgcaggaacgtggtggccattattatcgctattgtgatgatatgctattcattgtaccaactaagtataataaaactctagcaggtgatgtagcccagcggattaagcatcttaaggtagaactcaatactaagaaaactgagattcgagattttatatacaaagacagtaccttagtggcaaatatgcctttacagtatcttgggtttatttttgatgggagtaatatattattacgttcatcttctctcgcaagatattcggaacgaatgaaaagaggtgtccgcttagcaaaagctacaatggacagcaagaataggattagagaaaataaaggtgaagctttaaaagctttatttaagaaaaaattatatgccagatattcacatattggaagaaggaattttttgacttatggttatcgcgccgcgaagatcatgaattcgaaagctataaaaagacagttaaaaccattgcagaaaagattggaaaatgaaatactaaaataaatatttgctggcccgaatcatacagggccacaatacagttgaaaacaagctataataaacaacatctaatttttatataccgcaataactagcataaccccttggggcctctaaacgggtcttgaggggttttttgctgaaacctcaggcatttgagaagcacacggtcacactgcttccggtagtcaataaaccggtaaaccagcaatagacataagcggctatttaacgaccctgccctgaaccgacgaccgggtcgaatttgctttcgaatttctgccattcatccgcttattatcacttattcaggcgtagcaccaggcgtttaagggcaccaataactgccttaaaaaaattacgccccgccctgccactcatcgcaatactgttgtaattcatttaacattctgccgacatggaagccatcacagacggcatgatgaacctgaatcgccagcggcatcagcaccttgtcgccttgcgtataatatttgcccatagtgaaaacgggggcgaagaagttgtccatattggccacgtttaaatcaaaactggtgaaactcacccagggattggctgagacgaaaaacatattctcaataaaccctttagggaaataggccaggttttcaccgtaacacgccacatcttgcgaatatatgtgtagaaactgccggaaatcgtcgtggtattcactccagagcgatgaaaacgtttcagtttgctcatggaaaacggtgtaacaagggtgaacactatcccatatcaccagctcaccgtctttcatcgccatacggaactctggatgagcattcatcaggcgggcaagaatgtgaataaaggccggataaaacttgtgcttatttttctttacggtctttaaaaaggccgtaatatccagctgaacggtctggttataggtacattgagcaactgactgaaatgcctcaaaatgttctttacgatgccattgggatatatcaacggtggtatatccagtgatttttttctccattttagcttccttagctcctgaaaatctcgataactcaaaaaatacgcccggtagtgatcttatttcattatggtgaaagttggaacctcttacgtgccgatcaacgtctcattttcgccaaaagttggcccagggcttcccggtatcaacagggacaccaggatttatttattctgcgaagtgatcttccgtcacaggtatttattcggcgcaaagtgcgtcgggtgatgctgccaacttactgatttagtgtatgatggtgtttttgaggtgctccagtggcttctgtttctatcagctgtccctcctgttcagctactgacggggtggtgcgtaacggcaaaagcaccgccggacatcagcgctagcggagtgtatactggcttactatgttggcactgatgagggtgtcagtgaagtgcttcatgtggcaggagaaaaaaggctgcaccggtgcgtcagcagaatatgtgatacaggatatattccgcttcctcgctcactgactcgctacgctcggtcgttcgactgcggcgagcggaaatggcttacgaacggggcggagatttcctggaagatgccaggaagatacttaacagggaagtgagagggccgcggcaaagccgtttttccataggctccgcccccctgacaagcatcacgaaatctgacgctcaaatcagtggtggcgaaacccgacaggactataaagataccaggcgtttccccctggcggctccctcgtgcgctctcctgttcctgcctttcggtttaccggtgtcattccgctgttatggccgcgtttgtctcattccacgcctgacactcagttccgggtaggcagttcgctccaagctggactgtatgcacgaaccccccgttcagtccgaccgctgcgccttatccggtaactatcgtcttgagtccaacccggaaagacatgcaaaagcaccactggcagcagccactggtaattgatttagaggagttagtcttgaagtcatgcgccggttaaggctaaactgaaaggacaagttttggtgactgcgctcctccaagccagttacctcggttcaaagagttggtagctcagagaaccttcgaaaaaccgccctgcaaggcggttttttcgttttcagagcaagagattacgcgcagaccaaaacgatctcaagaagatcatcttattaatcagataaaatatttctagatttcagtgcaatttatctcttcaaatgtagcacctgaagtcagccccatacgatataagttgtaattctcatgttagtcatgccccgcgcccaccggaaggagctgactgggttgaaggctctcaagggcatcggtcgagatcccggtgcctaatgagtgagctaacttacattaattgcgttgcgca

SEQ ID NO: 3461 - DNA, 4098 bp, synthetic construct
  source 1..4098: mol_type = other DNA
acacgatataaaaccatctcattgcttgctgggttaactgagttgctgaatttttttctagaatttcgcaaaatttaataggtaaaccttgtttttttaaatttacgatgatataaaaataatgccctaaacaaaggtttaggggtattgtacaggttgtcagcatatctaacatttgcggcgaggttcacaatttgtatttaggtactgattgtggatgagaaggttggagaaagaccacttggttaagccggaggatgtgtcctagaattgtcgctattctgtcatcctccggttttgctaatttcattcagggaatataatggactacaaagaccatgacggtgattataaagatcatgacatcgattacaaggatgacgatgacaagggaggaagcggatcgatgaataatgatgattacccatggttcagaaaacgtggttatttgcatttcgatgaacctgtttcattaaaaaaagcggttaaatatgtttcctctccagaaaaaataataaaacattcttttctgccatttttaagctttgaagtaaaatcgtttaaaatcaaaaaagacaaatcaacaaaacaattaagtaaaactgaaaaattaagacctattgcctattcctcacatttggatagtcatatttatgcattttacgcagaatatcttactggacattatgaattattgatccaagaaaacaatttacacgagaacatccttgccttcagatctttaaataaaagcaatatagaatttgccaagagagcatttgatacaattactgaaatgggtgagtgtagcgctgttgcattagatctttctggtttttttgacaatttagatcatcaaattttgaaacaccagtggtgcaaagttattgggactgaagcgttgccgcaagaccattttgccatatacaaaagtataacaagatattctaaagttgataaaaatagagcgtatgagattttaggtatatcaaagaataaccccaagtataatagacgcaagatctgcacccctgttgattttagaaataagattagaaaaaatggtcttattatagttaataattcccaaaaaggtataccccaaggctcgccaattagtgctctactttcaaatatatatatgcttgactttgatattgaaatgagagattacgcgcaggaacgtggtggccattattatcgctattgtgatgatatgctattcattgtaccaactaagtataataaaactctagcaggtgatgtagcccagcggattaagcatcttaaggtagaactcaatactaagaaaactgagattcgagattttatatacaaagacagtaccttagtggcaaatatgcctttacagtatcttgggtttatttttgatgggagtaatatattattacgttcatcttctctcgcaagatattcggaacgaatgaaaagaggtgtccgcttagcaaaagctacaatggacagcaagaataggattagagaaaataaaggtgaagctttaaaagctttatttaagaaaaaattatatgccagatattcacatattggaagaaggaattttttgacttatggttatcgcgccgcgaagatcatgaattcgaaagctataaaaagacagttaaaaccattgcagaaaagattggaaaatgaaatactaaaataaatatttgctggcccgaatcatacagggccacaatacagttgaaaacaagctataataaacaacatctaatttttatataccgcaataactagcataaccccttggggcctctaaacgggtcttgaggggttttttgctgaaacctcaggcatttgagaagcacacggtcacactgcttccggtagtcaataaaccggtaaaccagcaatagacataagcggctatttaacgaccctgccctgaaccgacgaccgggtcgaatttgctttcgaatttctgccattcatccgcttattatcacttattcaggcgtagcaccaggcgtttaagggcaccaataactgccttaaaaaaattacgccccgccctgccactcatcgcaatactgttgtaattcatttaacattctgccgacatggaagccatcacagacggcatgatgaacctgaatcgccagcggcatcagcaccttgtcgccttgcgtataatatttgcccatagtgaaaacgggggcgaagaagttgtccatattggccacgtttaaatcaaaactggtgaaactcacccagggattggctgagacgaaaaacatattctcaataaaccctttagggaaataggccaggttttcaccgtaacacgccacatcttgcgaatatatgtgtagaaactgccggaaatcgtcgtggtattcactccagagcgatgaaaacgtttcagtttgctcatggaaaacggtgtaacaagggtgaacactatcccatatcaccagctcaccgtctttcatcgccatacggaactctggatgagcattcatcaggcgggcaagaatgtgaataaaggccggataaaacttgtgcttatttttctttacggtctttaaaaaggccgtaatatccagctgaacggtctggttataggtacattgagcaactgactgaaatgcctcaaaatgttctttacgatgccattgggatatatcaacggtggtatatccagtgatttttttctccattttagcttccttagctcctgaaaatctcgataactcaaaaaatacgcccggtagtgatcttatttcattatggtgaaagttggaacctcttacgtgccgatcaacgtctcattttcgccaaaagttggcccagggcttcccggtatcaacagggacaccaggatttatttattctgcgaagtgatcttccgtcacaggtatttattcggcgcaaagtgcgtcgggtgatgctgccaacttactgatttagtgtatgatggtgtttttgaggtgctccagtggcttctgtttctatcagctgtccctcctgttcagctactgacggggtggtgcgtaacggcaaaagcaccgccggacatcagcgctagcggagtgtatactggcttactatgttggcactgatgagggtgtcagtgaagtgcttcatgtggcaggagaaaaaaggctgcaccggtgcgtcagcagaatatgtgatacaggatatattccgcttcctcgctcactgactcgctacgctcggtcgttcgactgcggcgagcggaaatggcttacgaacggggcggagatttcctggaagatgccaggaagatacttaacagggaagtgagagggccgcggcaaagccgtttttccataggctccgcccccctgacaagcatcacgaaatctgacgctcaaatcagtggtggcgaaacccgacaggactataaagataccaggcgtttccccctggcggctccctcgtgcgctctcctgttcctgcctttcggtttaccggtgtcattccgctgttatggccgcgtttgtctcattccacgcctgacactcagttccgggtaggcagttcgctccaagctggactgtatgcacgaaccccccgttcagtccgaccgctgcgccttatccggtaactatcgtcttgagtccaacccggaaagacatgcaaaagcaccactggcagcagccactggtaattgatttagaggagttagtcttgaagtcatgcgccggttaaggctaaactgaaaggacaagttttggtgactgcgctcctccaagccagttacctcggttcaaagagttggtagctcagagaaccttcgaaaaaccgccctgcaaggcggttttttcgttttcagagcaagagattacgcgcagaccaaaacgatctcaagaagatcatcttattaatcagataaaatatttctagatttcagtgcaatttatctcttcaaatgtagcacctgaagtcagccccatacgatataagttgtaattctcatgttagtcatgccccgcgcccaccggaaggagctgactgggttgaaggctctcaagggcatcggtcgagatcccggtgcctaatgagtgagctaacttacattaattgcgttgcgca

SEQ ID NO: 3462 - DNA, 3757 bp, synthetic construct
  source 1..3757: mol_type = other DNA
cccgcgcccaccggaaggagctgactgggttgaaggctctcaagggcatcggtcgagatcccggtgcctaatgagtgagctaacttacattaattgcgttgcgaagctttgacagctagctcagtcctaggtataatactagcgtcgacgctttaataaggagatatagcatgaataatgatgattacccatggttcagaaaacgtggttatttgcatttcgatgaacctgtttcattaaaaaaagcggttaaatatgtttcctctccagaaaaaataataaaacattcttttctgccatttttaagctttgaagtaaaatcgtttaaaatcaaaaaagacaaatcaacaaaacaattaagtaaaactgaaaaattaagacctattgcctattcctcacatttggatagtcatatttatgcattttacgcagaatatcttactggacattatgaattattgatccaagaaaacaatttacacgagaacatccttgccttcagatctttaaataaaagcaatatagaatttgccaagagagcatttgatacaattactgaaatgggtgagtgtagcgctgttgcattagatctttctggtttttttgacaatttagatcatcaaattttgaaacaccagtggtgcaaagttattgggactgaagcgttgccgcaagaccattttgccatatacaaaagtataacaagatattctaaagttgataaaaatagagcgtatgagattttaggtatatcaaagaataaccccaagtataatagacgcaagatctgcacccctgttgattttagaaataagattagaaaaaatggtcttattatagttaataattcccaaaaaggtataccccaaggctcgccaattagtgctctactttcaaatatatatatgcttgactttgatattgaaatgagagattacgcgcaggaacgtggtggccattattatcgctattgtgatgatatgctattcattgtaccaactaagtataataaaactctagcaggtgatgtagcccagcggattaagcatcttaaggtagaactcaatactaagaaaactgagattcgagattttatatacaaagacagtaccttagtggcaaatatgcctttacagtatcttgggtttatttttgatgggagtaatatattattacgttcatcttctctcgcaagatattcggaacgaatgaaaagaggtgtccgcttagcaaaagctacaatggacagcaagaataggattagagaaaataaaggtgaagctttaaaagctttatttaagaaaaaattatatgccagatattcacatattggaagaaggaattttttgacttatggttatcgcgccgcgaagatcatgaattcgaaagctataaaaagacagttaaaaccattgcagaaaagattggaaaatgaaatactaaaataaatatttgctggcccgaatcatacagggccacaatacagttgaaaacaagctataataaacaacatctaatttttatataccgcaataactagcataaccccttggggcctctaaacgggtcttgaggggttttttgctgaaacctcaggcatttgagaagcacacggtcacactgcttccggtagtcaataaaccggtaaaccagcaatagacataagcggctatttaacgaccctgccctgaaccgacgaccgggtcgaatttgctttcgaatttctgccattcatccgcttattatcacttattcaggcgtagcaccaggcgtttaagggcaccaataactgccttaaaaaaattacgccccgccctgccactcatcgcaatactgttgtaattcatttaacattctgccgacatggaagccatcacagacggcatgatgaacctgaatcgccagcggcatcagcaccttgtcgccttgcgtataatatttgcccatagtgaaaacgggggcgaagaagttgtccatattggccacgtttaaatcaaaactggtgaaactcacccagggattggctgagacgaaaaacatattctcaataaaccctttagggaaataggccaggttttcaccgtaacacgccacatcttgcgaatatatgtgtagaaactgccggaaatcgtcgtggtattcactccagagcgatgaaaacgtttcagtttgctcatggaaaacggtgtaacaagggtgaacactatcccatatcaccagctcaccgtctttcatcgccatacggaactctggatgagcattcatcaggcgggcaagaatgtgaataaaggccggataaaacttgtgcttatttttctttacggtctttaaaaaggccgtaatatccagctgaacggtctggttataggtacattgagcaactgactgaaatgcctcaaaatgttctttacgatgccattgggatatatcaacggtggtatatccagtgatttttttctccattttagcttccttagctcctgaaaatctcgataactcaaaaaatacgcccggtagtgatcttatttcattatggtgaaagttggaacctcttacgtgccgatcaacgtctcattttcgccaaaagttggcccagggcttcccggtatcaacagggacaccaggatttatttattctgcgaagtgatcttccgtcacaggtatttattcggcgcaaagtgcgtcgggtgatgctgccaacttactgatttagtgtatgatggtgtttttgaggtgctccagtggcttctgtttctatcagctgtccctcctgttcagctactgacggggtggtgcgtaacggcaaaagcaccgccggacatcagcgctagcggagtgtatactggcttactatgttggcactgatgagggtgtcagtgaagtgcttcatgtggcaggagaaaaaaggctgcaccggtgcgtcagcagaatatgtgatacaggatatattccgcttcctcgctcactgactcgctacgctcggtcgttcgactgcggcgagcggaaatggcttacgaacggggcggagatttcctggaagatgccaggaagatacttaacagggaagtgagagggccgcggcaaagccgtttttccataggctccgcccccctgacaagcatcacgaaatctgacgctcaaatcagtggtggcgaaacccgacaggactataaagataccaggcgtttccccctggcggctccctcgtgcgctctcctgttcctgcctttcggtttaccggtgtcattccgctgttatggccgcgtttgtctcattccacgcctgacactcagttccgggtaggcagttcgctccaagctggactgtatgcacgaaccccccgttcagtccgaccgctgcgccttatccggtaactatcgtcttgagtccaacccggaaagacatgcaaaagcaccactggcagcagccactggtaattgatttagaggagttagtcttgaagtcatgcgccggttaaggctaaactgaaaggacaagttttggtgactgcgctcctccaagccagttacctcggttcaaagagttggtagctcagagaaccttcgaaaaaccgccctgcaaggcggttttttcgttttcagagcaagagattacgcgcagaccaaaacgatctcaagaagatcatcttattaatcagataaaatatttctagatttcagtgcaatttatctcttcaaatgtagcacctgaagtcagccccatacgatataagttgtaattctcatgttagtcatgc

SEQ ID NO: 3463 - DNA, 3998 bp, synthetic construct
  source 1..3998: mol_type = other DNA
tccgggattgacagctagctcagtcctaggtataatgctagcgtggagatatacctcgaggccctaaacaaaggtttaggggtattgtacaggttgtcaagcctcccacaggtcttggtgaaaccaatcactgtgacgacggtaagcaacactagcattcttttgaattagctacagacgctactgattacattatacagcatatctaacatttgcggcgaggttcacaatttgtatttaggtactgattgtggatgagaaggttggagaaagaccacttggttaagccggaggatgtgtcctagaattgtcgctattctgtcatcctccggttttgctaactagcataaccccttggggcctctaaacgggtcttgaggggttttttgtgaagctacagtggaattcttgacagctagctcagtcctaggtataatgctagcgtggagatatacggtaccgccctaaacaaaggtttaggggtattgtacaggttgtcaagcctcccacaggtcttggtgaaaccaatcactgtgacgacggtaagcaacacttggatgatattcataattgactccacgctacctaatttttagcgaaacatatctaacatttgcggcgaggttcacaatttgtatttaggtactgattgtggatgagaaggttggagaaagaccacttggttaagccggaggatgtgtcctagaattgtcgctattctgtcatcctccggttttgctaactagcataaccccttggggcctctaaacgggtcttgaggggttttttgctgaaacctcaggcatttgagaagcacacggtcacactgcttccggtagtcaataaaccggtaaaccagcaatagacataagcggctatttaacgaccctgccctgaaccgacgaccgggtcatcgtggccggatcttgcggcccctcggcttgaacgaattgttagacattatttgccgactaccttggtgatctcgcctttcacgtagtggacaaattcttccaactgatctgcgcgcgaggccaagcgatcttcttcttgtccaagataagcctgtctagcttcaagtatgacgggctgatactgggccggcaggcgctccattgcccagtcggcagcgacatccttcggcgcgattttgccggttactgcgctgtaccaaatgcgggacaacgtaagcactacatttcgctcatcgccagcccagtcgggcggcgagttccatagcgttaaggtttcatttagcgcctcaaatagatcctgttcaggaaccggatcaaagagttcctccgccgctggacctaccaaggcaacgctatgttctcttgcttttgtcagcaagatagccagatcaatgtcgatcgtggctggctcgaagatacctgcaagaatgtcattgcgctgccattctccaaattgcagttcgcgcttagctggataacgccacggaatgatgtcgtcgtgcacaacaatggtgacttctacagcgcggagaatctcgctctctccaggggaagccgaagtttccaaaaggtcgttgatcaaagctcgccgcgttgtttcatcaagccttacggtcaccgtaaccagcaaatcaatatcactgtgtggcttcaggccgccatccactgcggagccgtacaaatgtacggccagcaacgtcggttcgagatggcgctcgatgacgccaactacctctgatagttgagtcgatacttcggcgatcaccgcttccctcatactcttcctttttcaatattattgaagcatttatcagggttattgtctcatgagcggatacatatttgaatgtatttagaaaaataaacaaatagctagctcactcggtcgctacgctccgggcgtgagactgcggcgggcgctgcggacacatacaaagttacccacagattccgtggataagcaggggactaacatgtgaggcaaaacagcagggccgcgccggtggcgtttttccataggctccgccctcctgccagagttcacataaacagacgcttttccggtgcatctgtgggagccgtgaggctcaaccatgaatctgacagtacgggcgaaacccgacaggacttaaagatccccaccgtttccggcgggtcgctccctcttgcgctctcctgttccgaccctgccgtttaccggatacctgttccgcctttctcccttacgggaagtgtggcgctttctcatagctcacacactggtatctcggctcggtgtaggtcgttcgctccaagctgggctgtaagcaagaactccccgttcagcccgactgctgcgccttatccggtaactgttcacttgagtccaacccggaaaagcacggtaaaacgccactggcagcagccattggtaactgggagttcgcagaggatttgtttagctaaacacgcggttgctcttgaagtgtgcgccaaagtccggctacactggaaggacagatttggttgctgtgctctgcgaaagccagttaccacggttaagcagttccccaactgacttaaccttcgatcaaaccacctccccaggtggttttttcgtttacagggcaaaagattacgcgcagaaaaaaaggatctcaagaagatcctttgatcttttctactgaaccgctctagatttcagtgcaatttatctcttcaaatgtagcacctgaagtcagccccatacgatataagttgtaattctcatgttagtcatgccccgcgcccaccggaaggagctgactgggttgaaggctctcaagggcatcggtcgagatcccggtgcctaatgagtgagctaacttacattaattgcgttgcgctcactgcccgctttccagtcgggaaacctgtcgtgccagctgcattaatgaatcggccaacgcgcggggagaggcggtttgcgtattgggcgccagggtggtttttcttttcaccagtgagacgggcaacagctgattgcccttcaccgcctggccctgagagagttgcagcaagcggtccacgctggtttgccccagcaggcgaaaatcctgtttgatggtggttaacggcgggatataacatgagctgtcttcggtatcgtcgtatcccactaccgagatgtccgcaccaacgcgcagcccggactcggtaatggcgcgcattgcgcccagcgccatctgatcgttggcaaccagcatcgcagtgggaacgatgccctcattcagcatttgcatggtttgttgaaaaccggacatggcactccagtcgccttcccgttccgctatcggctgaatttgattgcgagtgagatatttatgccagccagccagacgcagacgcgccgagacagaacttaatgggcccgctaacagcgcgatttgctggtgacccaatgcgaccagatgctccacgcccagtcgcgtaccgtcttcatgggagaaaataatactgttgatgggtgtctggtcagagacatcaagaaataacgccggaacattagtgcaggcagcttccacagcaatggcatcctggtcatccagcggatagttaatgatcagcccactgacgcgttgcgcgagaagattgtgcaccgccgctttacaggcttcgacgccgcttcgttctaccatcgacaccaccacgctggcacccagttgatcggcgcgagatttaatcgccgcgacaatttgcgacggcgcgtgcagggccagactggaggtggcaacgccaatcagcaacgactgtttgcccgccagttgttgtgccacgcggttgggaatgtaattcagctccgccatcgccgcttccactttttcccgcgttttcgcagaaacgtggctggcctggttcaccacgcgggaaacggtctgataagagacaccggcatactctgcgacatcgtataacgttactggtttcacattcaccaccctgaattgactctcttccgggcgctatcatgccataccgcgaaaggttttgcgccattcgatggtg

SEQ ID NO: 3464 - DNA, 3597 bp, synthetic construct
  source 1..3597: mol_type = other DNA
tccgggattgacagctagctcagtcctaggtataatgctagcgtggagatatacctcgaggccctaaacaaaggtttaggggtattgtacaggttgtcaagcctcccacaggtcttggtgaaaccaatcactgtgacgacggtaagcaacactagcattcttttgaattagctacagacgctactgattacattatacagcatatctaacatttgcggcgaggttcacaatttgtatttaggtactgattgtggatgagaaggttggagaaagaccacttggttaagccggaggatgtgtcctagaattgtcgctattctgtcatcctccggttttgctaactagcataaccccttggggcctctaaacgggtcttgaggggttttttgctgaaacctcaggcatttgagaagcacacggtcacactgcttccggtagtcaataaaccggtaaaccagcaatagacataagcggctatttaacgaccctgccctgaaccgacgaccgggtcatcgtggccggatcttgcggcccctcggcttgaacgaattgttagacattatttgccgactaccttggtgatctcgcctttcacgtagtggacaaattcttccaactgatctgcgcgcgaggccaagcgatcttcttcttgtccaagataagcctgtctagcttcaagtatgacgggctgatactgggccggcaggcgctccattgcccagtcggcagcgacatccttcggcgcgattttgccggttactgcgctgtaccaaatgcgggacaacgtaagcactacatttcgctcatcgccagcccagtcgggcggcgagttccatagcgttaaggtttcatttagcgcctcaaatagatcctgttcaggaaccggatcaaagagttcctccgccgctggacctaccaaggcaacgctatgttctcttgcttttgtcagcaagatagccagatcaatgtcgatcgtggctggctcgaagatacctgcaagaatgtcattgcgctgccattctccaaattgcagttcgcgcttagctggataacgccacggaatgatgtcgtcgtgcacaacaatggtgacttctacagcgcggagaatctcgctctctccaggggaagccgaagtttccaaaaggtcgttgatcaaagctcgccgcgttgtttcatcaagccttacggtcaccgtaaccagcaaatcaatatcactgtgtggcttcaggccgccatccactgcggagccgtacaaatgtacggccagcaacgtcggttcgagatggcgctcgatgacgccaactacctctgatagttgagtcgatacttcggcgatcaccgcttccctcatactcttcctttttcaatattattgaagcatttatcagggttattgtctcatgagcggatacatatttgaatgtatttagaaaaataaacaaatagctagctcactcggtcgctacgctccgggcgtgagactgcggcgggcgctgcggacacatacaaagttacccacagattccgtggataagcaggggactaacatgtgaggcaaaacagcagggccgcgccggtggcgtttttccataggctccgccctcctgccagagttcacataaacagacgcttttccggtgcatctgtgggagccgtgaggctcaaccatgaatctgacagtacgggcgaaacccgacaggacttaaagatccccaccgtttccggcgggtcgctccctcttgcgctctcctgttccgaccctgccgtttaccggatacctgttccgcctttctcccttacgggaagtgtggcgctttctcatagctcacacactggtatctcggctcggtgtaggtcgttcgctccaagctgggctgtaagcaagaactccccgttcagcccgactgctgcgccttatccggtaactgttcacttgagtccaacccggaaaagcacggtaaaacgccactggcagcagccattggtaactgggagttcgcagaggatttgtttagctaaacacgcggttgctcttgaagtgtgcgccaaagtccggctacactggaaggacagatttggttgctgtgctctgcgaaagccagttaccacggttaagcagttccccaactgacttaaccttcgatcaaaccacctccccaggtggttttttcgtttacagggcaaaagattacgcgcagaaaaaaaggatctcaagaagatcctttgatcttttctactgaaccgctctagatttcagtgcaatttatctcttcaaatgtagcacctgaagtcagccccatacgatataagttgtaattctcatgttagtcatgccccgcgcccaccggaaggagctgactgggttgaaggctctcaagggcatcggtcgagatcccggtgcctaatgagtgagctaacttacattaattgcgttgcgctcactgcccgctttccagtcgggaaacctgtcgtgccagctgcattaatgaatcggccaacgcgcggggagaggcggtttgcgtattgggcgccagggtggtttttcttttcaccagtgagacgggcaacagctgattgcccttcaccgcctggccctgagagagttgcagcaagcggtccacgctggtttgccccagcaggcgaaaatcctgtttgatggtggttaacggcgggatataacatgagctgtcttcggtatcgtcgtatcccactaccgagatgtccgcaccaacgcgcagcccggactcggtaatggcgcgcattgcgcccagcgccatctgatcgttggcaaccagcatcgcagtgggaacgatgccctcattcagcatttgcatggtttgttgaaaaccggacatggcactccagtcgccttcccgttccgctatcggctgaatttgattgcgagtgagatatttatgccagccagccagacgcagacgcgccgagacagaacttaatgggcccgctaacagcgcgatttgctggtgacccaatgcgaccagatgctccacgcccagtcgcgtaccgtcttcatgggagaaaataatactgttgatgggtgtctggtcagagacatcaagaaataacgccggaacattagtgcaggcagcttccacagcaatggcatcctggtcatccagcggatagttaatgatcagcccactgacgcgttgcgcgagaagattgtgcaccgccgctttacaggcttcgacgccgcttcgttctaccatcgacaccaccacgctggcacccagttgatcggcgcgagatttaatcgccgcgacaatttgcgacggcgcgtgcagggccagactggaggtggcaacgccaatcagcaacgactgtttgcccgccagttgttgtgccacgcggttgggaatgtaattcagctccgccatcgccgcttccactttttcccgcgttttcgcagaaacgtggctggcctggttcaccacgcgggaaacggtctgataagagacaccggcatactctgcgacatcgtataacgttactggtttcacattcaccaccctgaattgactctcttccgggcgctatcatgccataccgcgaaaggttttgcgccattcgatggtg

SEQ ID NO: 3465 - DNA, 3597 bp, synthetic construct
  source 1..3597: mol_type = other DNA
tccgggattgacagctagctcagtcctaggtataatgctagcgtggagatatacctcgaggccctaaacaaaggtttaggggtattgtacaggttgtcaagcctcccacaggtcttggtgaaaccaatcactgtgacgacggtaagcaacacttggatgatattcataattgactccacgctacctaatttttagcgaaacatatctaacatttgcggcgaggttcacaatttgtatttaggtactgattgtggatgagaaggttggagaaagaccacttggttaagccggaggatgtgtcctagaattgtcgctattctgtcatcctccggttttgctaactagcataaccccttggggcctctaaacgggtcttgaggggttttttgctgaaacctcaggcatttgagaagcacacggtcacactgcttccggtagtcaataaaccggtaaaccagcaatagacataagcggctatttaacgaccctgccctgaaccgacgaccgggtcatcgtggccggatcttgcggcccctcggcttgaacgaattgttagacattatttgccgactaccttggtgatctcgcctttcacgtagtggacaaattcttccaactgatctgcgcgcgaggccaagcgatcttcttcttgtccaagataagcctgtctagcttcaagtatgacgggctgatactgggccggcaggcgctccattgcccagtcggcagcgacatccttcggcgcgattttgccggttactgcgctgtaccaaatgcgggacaacgtaagcactacatttcgctcatcgccagcccagtcgggcggcgagttccatagcgttaaggtttcatttagcgcctcaaatagatcctgttcaggaaccggatcaaagagttcctccgccgctggacctaccaaggcaacgctatgttctcttgcttttgtcagcaagatagccagatcaatgtcgatcgtggctggctcgaagatacctgcaagaatgtcattgcgctgccattctccaaattgcagttcgcgcttagctggataacgccacggaatgatgtcgtcgtgcacaacaatggtgacttctacagcgcggagaatctcgctctctccaggggaagccgaagtttccaaaaggtcgttgatcaaagctcgccgcgttgtttcatcaagccttacggtcaccgtaaccagcaaatcaatatcactgtgtggcttcaggccgccatccactgcggagccgtacaaatgtacggccagcaacgtcggttcgagatggcgctcgatgacgccaactacctctgatagttgagtcgatacttcggcgatcaccgcttccctcatactcttcctttttcaatattattgaagcatttatcagggttattgtctcatgagcggatacatatttgaatgtatttagaaaaataaacaaatagctagctcactcggtcgctacgctccgggcgtgagactgcggcgggcgctgcggacacatacaaagttacccacagattccgtggataagcaggggactaacatgtgaggcaaaacagcagggccgcgccggtggcgtttttccataggctccgccctcctgccagagttcacataaacagacgcttttccggtgcatctgtgggagccgtgaggctcaaccatgaatctgacagtacgggcgaaacccgacaggacttaaagatccccaccgtttccggcgggtcgctccctcttgcgctctcctgttccgaccctgccgtttaccggatacctgttccgcctttctcccttacgggaagtgtggcgctttctcatagctcacacactggtatctcggctcggtgtaggtcgttcgctccaagctgggctgtaagcaagaactccccgttcagcccgactgctgcgccttatccggtaactgttcacttgagtccaacccggaaaagcacggtaaaacgccactggcagcagccattggtaactgggagttcgcagaggatttgtttagctaaacacgcggttgctcttgaagtgtgcgccaaagtccggctacactggaaggacagatttggttgctgtgctctgcgaaagccagttaccacggttaagcagttccccaactgacttaaccttcgatcaaaccacctccccaggtggttttttcgtttacagggcaaaagattacgcgcagaaaaaaaggatctcaagaagatcctttgatcttttctactgaaccgctctagatttcagtgcaatttatctcttcaaatgtagcacctgaagtcagccccatacgatataagttgtaattctcatgttagtcatgccccgcgcccaccggaaggagctgactgggttgaaggctctcaagggcatcggtcgagatcccggtgcctaatgagtgagctaacttacattaattgcgttgcgctcactgcccgctttccagtcgggaaacctgtcgtgccagctgcattaatgaatcggccaacgcgcggggagaggcggtttgcgtattgggcgccagggtggtttttcttttcaccagtgagacgggcaacagctgattgcccttcaccgcctggccctgagagagttgcagcaagcggtccacgctggtttgccccagcaggcgaaaatcctgtttgatggtggttaacggcgggatataacatgagctgtcttcggtatcgtcgtatcccactaccgagatgtccgcaccaacgcgcagcccggactcggtaatggcgcgcattgcgcccagcgccatctgatcgttggcaaccagcatcgcagtgggaacgatgccctcattcagcatttgcatggtttgttgaaaaccggacatggcactccagtcgccttcccgttccgctatcggctgaatttgattgcgagtgagatatttatgccagccagccagacgcagacgcgccgagacagaacttaatgggcccgctaacagcgcgatttgctggtgacccaatgcgaccagatgctccacgcccagtcgcgtaccgtcttcatgggagaaaataatactgttgatgggtgtctggtcagagacatcaagaaataacgccggaacattagtgcaggcagcttccacagcaatggcatcctggtcatccagcggatagttaatgatcagcccactgacgcgttgcgcgagaagattgtgcaccgccgctttacaggcttcgacgccgcttcgttctaccatcgacaccaccacgctggcacccagttgatcggcgcgagatttaatcgccgcgacaatttgcgacggcgcgtgcagggccagactggaggtggcaacgccaatcagcaacgactgtttgcccgccagttgttgtgccacgcggttgggaatgtaattcagctccgccatcgccgcttccactttttcccgcgttttcgcagaaacgtggctggcctggttcaccacgcgggaaacggtctgataagagacaccggcatactctgcgacatcgtataacgttactggtttcacattcaccaccctgaattgactctcttccgggcgctatcatgccataccgcgaaaggttttgcgccattcgatggtg

SEQ ID NO: 3466 - DNA, 6805 bp, synthetic construct
  source 1..6805: mol_type = other DNA
gacattgattattgactagttattaatagtaatcaattacggggtcattagttcatagcccatatatggagttccgcgttacataacttacggtaaatggcccgcctggctgaccgcccaacgacccccgcccattgacgtcaataatgacgtatgttcccatagtaacgccaatagggactttccattgacgtcaatgggtggagtatttacggtaaactgcccacttggcagtacatcaagtgtatcatatgccaagtacgccccctattgacgtcaatgacggtaaatggcccgcctggcattatgcccagtacatgaccttatgggactttcctacttggcagtacatctacgtattagtcatcgctattaccatggtgatgcggttttggcagtacatcaatgggcgtggatagcggtttgactcacggggatttccaagtctccaccccattgacgtcaatgggagtttgttttggcaccaaaatcaacgggactttccaaaatgtcgtaacaactccgccccattgacgcaaatgggcggtaggcgtgtacggtgggaggtctatataagcagagctctctggctaactagagaacccactgcttactggcttatcgaaattaatacgactcactatagggagacccaagctggctagcgtttaaacttaagcttggtaccgagctcggatccgccaccatgggcaaacggacagccgacggaagcgagttcgagtcaccgaaaaagaagcgaaaagttggctccggaatggactacaaggaccacgacggcgactacaaggatcacgatattgactacaaggacgatgatgacaagggcggctctggcagcatgagcgagcctgtggaatggttcaagcggcggagatacctgcatttcgatctgcccaccagcgagcccgccgctgtggccattgccggaaatccttctattgtggcccgccacgccttctaccccttcatccagttcaccgtgaaaagcagaaaggtgaagtgggacaagctgaccaagcggctggtgacaacagaaaaggaaagaccagtctcctacgccagccacgtggacagccacatctatgcatgctacgcctcaatcctcagccagcggtacgaggactacctgaaagaggtgggctaccagagctctgtgctggcttttagaaagctgggcaagtccaacatcgagttcgccaaagatgcctttgacgccatcaaagagatgggaggtgccgatgtgatcgccgccgacatctctgattttttcggcagcctgaaccacaagatcctgaaggcttcctgggccaagatcctgaaggtgaacgagttgccaaacgaccactacaacgtgtttaagagcctgacaagattcacctgggtcgacaagaccaacctgtacaaagctctgggcatctccatctacaaccctagaggcagcggcgccagaatctgtacccctgaaatcttcagaagcgtggtgcggaagctgggcctgatccaaagaaacgccgccgacaagggaatcccccagggcagccccatcagcgccctgctcagcaacatctacatgaccgatttcgaccaggccctgtggaccagcatcgcctctatgggcggaaaatacttcagatactgcgacgacatgctgatcatcgcccctgagggcaagggcaaagagttcatgcggctggccagagagctggctgatctgtacgccctgcctctgcaccctaagaaaaccgaggaacggttcttcacaagcagcagcggcaagctgctggccgataaacctctgcaatacctgggctttgtgttcgacgggcagcaggtttctctgcggagcgcctccctggctagatacagcgacagaatgagaaggggcgtgcggctggcccgggtgaccatgcacgccagaaacaccctgagagtggaacgtggagagagccctagaccactgtataagggcaaactgtacagaagatacagctatctgggcagaaggaatttcgtgtcttacgccatcagagccgctaatatcctggacgagaaggccatcaagagacaggtgaagcctctgtggaagagactgcggagtcagatgaagtgaagtctagagggcccgtttaaacccgctgatcagcctcgactgtgccttctagttgccagccatctgttgtttgcccctcccccgtgccttccttgaccctggaaggtgccactcccactgtcctttcctaataaaatgaggaaattgcatcgcattgtctgagtaggtgtcattctattctggggggtggggtggggcaggacagcaagggggaggattgggaagacaatagcaggcatgctggggatgcggtgggctctatggcttctgaggcggaaagaaccagctggggctctagggggtatccccacgcgccctgtagcggcgcattaagcgcggcgggtgtggtggttacgcgcagcgtgaccgctacacttgccagcgccctagcgcccgctcctttcgctttcttcccttcctttctcgccacgttcgccggctttccccgtcaagctctaaatcgggggctccctttagggttccgatttagtgctttacggcacctcgaccccaaaaaacttgattagggtgatggttcacgtagtgggccatcgccctgatagacggtttttcgccctttgacgttggagtccacgttctttaatagtggactcttgttccaaactggaacaacactcaaccctatctcggtctattcttttgatttataagggattttgccgatttcggcctattggttaaaaaatgagctgatttaacaaaaatttaacgcgaattaattctgtggaatgtgtgtcagttagggtgtggaaagtccccaggctccccagcaggcagaagtatgcaaagcatgcatctcaattagtcagcaaccaggtgtggaaagtccccaggctccccagcaggcagaagtatgcaaagcatgcatctcaattagtcagcaaccatagtcccgcccctaactccgcccatcccgcccctaactccgcccagttccgcccattctccgccccatggctgactaattttttttatttatgcagaggccgaggccgcctctgcctctgagctattccagaagtagtgaggaggcttttttggaggcctaggcttttgcaaaaagctcccgggagcttgtatatccattttcggatctgatcaagagacaggatgaggatcgtttcgcatgattgaacaagatggattgcacgcaggttctccggccgcttgggtggagaggctattcggctatgactgggcacaacagacaatcggctgctctgatgccgccgtgttccggctgtcagcgcaggggcgcccggttctttttgtcaagaccgacctgtccggtgccctgaatgaactgcaggacgaggcagcgcggctatcgtggctggccacgacgggcgttccttgcgcagctgtgctcgacgttgtcactgaagcgggaagggactggctgctattgggcgaagtgccggggcaggatctcctgtcatctcaccttgctcctgccgagaaagtatccatcatggctgatgcaatgcggcggctgcatacgcttgatccggctacctgcccattcgaccaccaagcgaaacatcgcatcgagcgagcacgtactcggatggaagccggtcttgtcgatcaggatgatctggacgaagagcatcaggggctcgcgccagccgaactgttcgccaggctcaaggcgcgcatgcccgacggcgaggatctcgtcgtgacccatggcgatgcctgcttgccgaatatcatggtggaaaatggccgcttttctggattcatcgactgtggccggctgggtgtggcggaccgctatcaggacatagcgttggctacccgtgatattgctgaagagcttggcggcgaatgggctgaccgcttcctcgtgctttacggtatcgccgctcccgattcgcagcgcatcgccttctatcgccttcttgacgagttcttctgagcgggactctggggttcgaaatgaccgaccaagcgacgcccaacctgccatcacgagatttcgattccaccgccgccttctatgaaaggttgggcttcggaatcgttttccgggacgccggctggatgatcctccagcgcggggatctcatgctggagttcttcgcccaccccaacttgtttattgcagcttataatggttacaaataaagcaatagcatcacaaatttcacaaataaagcatttttttcactgcattctagttgtggtttgtccaaactcatcaatgtatcttatcatgtctgtataccgtcgacctctagctagagcttggcgtaatcatggtcatagctgtttcctgtgtgaaattgttatccgctcacaattccacacaacatacgagccggaagcataaagtgtaaagcctggggtgcctaatgagtgagctaactcacattaattgcgttgcgctcactgcccgctttccagtcgggaaacctgtcgtgccagctgcattaatgaatcggccaacgcgcggggagaggcggtttgcgtattgggcgctcttccgcttcctcgctcactgactcgctgcgctcggtcgttcggctgcggcgagcggtatcagctcactcaaaggcggtaatacggttatccacagaatcaggggataacgcaggaaagaacatgtgagcaaaaggccagcaaaaggccaggaaccgtaaaaaggccgcgttgctggcgtttttccataggctccgcccccctgacgagcatcacaaaaatcgacgctcaagtcagaggtggcgaaacccgacaggactataaagataccaggcgtttccccctggaagctccctcgtgcgctctcctgttccgaccctgccgcttaccggatacctgtccgcctttctcccttcgggaagcgtggcgctttctcatagctcacgctgtaggtatctcagttcggtgtaggtcgttcgctccaagctgggctgtgtgcacgaaccccccgttcagcccgaccgctgcgccttatccggtaactatcgtcttgagtccaacccggtaagacacgacttatcgccactggcagcagccactggtaacaggattagcagagcgaggtatgtaggcggtgctacagagttcttgaagtggtggcctaactacggctacactagaagaacagtatttggtatctgcgctctgctgaagccagttaccttcggaaaaagagttggtagctcttgatccggcaaacaaaccaccgctggtagcggtttttttgtttgcaagcagcagattacgcgcagaaaaaaaggatctcaagaagatcctttgatcttttctacggggtctgacgctcagtggaacgaaaactcacgttaagggattttggtcatgagattatcaaaaaggatcttcacctagatccttttaaattaaaaatgaagttttaaatcaatctaaagtatatatgagtaaacttggtctgacagttaccaatgcttaatcagtgaggcacctatctcagcgatctgtctatttcgttcatccatagttgcctgactccccgtcgtgtagataactacgatacgggagggcttaccatctggccccagtgctgcaatgataccgcgagacccacgctcaccggctccagatttatcagcaataaaccagccagccggaagggccgagcgcagaagtggtcctgcaactttatccgcctccatccagtctattaattgttgccgggaagctagagtaagtagttcgccagttaatagtttgcgcaacgttgttgccattgctacaggcatcgtggtgtcacgctcgtcgtttggtatggcttcattcagctccggttcccaacgatcaaggcgagttacatgatcccccatgttgtgcaaaaaagcggttagctccttcggtcctccgatcgttgtcagaagtaagttggccgcagtgttatcactcatggttatggcagcactgcataattctcttactgtcatgccatccgtaagatgcttttctgtgactggtgagtactcaaccaagtcattctgagaatagtgtatgcggcgaccgagttgctcttgcccggcgtcaatacgggataataccgcgccacatagcagaactttaaaagtgctcatcattggaaaacgttcttcggggcgaaaactctcaaggatcttaccgctgttgagatccagttcgatgtaacccactcgtgcacccaactgatcttcagcatcttttactttcaccagcgtttctgggtgagcaaaaacaggaaggcaaaatgccgcaaaaaagggaataagggcgacacggaaatgttgaatactcatactcttcctttttcaatattattgaagcatttatcagggttattgtctcatgagcggatacatatttgaatgtatttagaaaaataaacaaataggggttccgcgcacatttccccgaaaagtgccacctgacgtcgacggatcgggagatctcccgatcccctatggtgcactctcagtacaatctgctctgatgccgcatagttaagccagtatctgctccctgcttgtgtgttggaggtcgctgagtagtgcgcgagcaaaatttaagctacaacaaggcaaggcttgaccgacaattgcatgaagaatctgcttagggttaggcgttttgcgctgcttcgcgatgtacgggccagatatacgcgtt

SEQ ID NO: 3467 - DNA, 6817 bp, synthetic construct
  source 1..6817: mol_type = other DNA
gacattgattattgactagttattaatagtaatcaattacggggtcattagttcatagcccatatatggagttccgcgttacataacttacggtaaatggcccgcctggctgaccgcccaacgacccccgcccattgacgtcaataatgacgtatgttcccatagtaacgccaatagggactttccattgacgtcaatgggtggagtatttacggtaaactgcccacttggcagtacatcaagtgtatcatatgccaagtacgccccctattgacgtcaatgacggtaaatggcccgcctggcattatgcccagtacatgaccttatgggactttcctacttggcagtacatctacgtattagtcatcgctattaccatggtgatgcggttttggcagtacatcaatgggcgtggatagcggtttgactcacggggatttccaagtctccaccccattgacgtcaatgggagtttgttttggcaccaaaatcaacgggactttccaaaatgtcgtaacaactccgccccattgacgcaaatgggcggtaggcgtgtacggtgggaggtctatataagcagagctctctggctaactagagaacccactgcttactggcttatcgaaattaatacgactcactatagggagacccaagctggctagcgtttaaacttaagcttggtaccgagctcggatccgccaccatgggcaaacggacagccgacggaagcgagttcgagtcaccgaaaaagaagcgaaaagttggctccggaatggactacaaagatcacgacggcgactacaaggatcacgacatcgactacaaggacgatgatgataagggcggtagcgggagcatggccgaagcctggtacaagagcagaggctacctgcacttcgaccggcctgtgaatcaagccaccgccacagagatcgtgtccagccctgatgctgtgtccagacacgccttctaccccttcatccggtatgtggctcagacccagaaggtgttcttcgacaagggcctgggcaaggtggtgaagaaggaacctaagaaacgaccaatctcttacgccgctcacgtggacagccacatctactcatactactgtgagaagctgagcaaggcctacgaggaccatctgggcaaggtgccttggagcagctctatcctggcctttagaagcctgggaaagagcaacatcgacttcgcccgggacgctttcctggacatcagcgtgcgggactccagctgcgtgatcgccatcgatattaagggctttttcgagaacctgaatcacgcccacctgaaaaagagctggcagacactgctgggcaccagtacactgcccgacgaccattacgccgtctacagaagcctgaccaagtacagcttcgtgaatagagatcaggtgtacgaggtgctgggactgtccaagaacaaccctaaaaacggccggaagagaatctgcgagcctcagaaattccgggaaaaggtgagaaacggcggcctgatcgaaaccaacaaactgaacaagggcatcccccagggcagccctatctccgcaatgctgagcaacgtgtatatgatgggctttgacgaacaggtccacgcttacgtgcaggcctgcggcggcagctactacagatactgtgacgacgtgctgctgattgtgcccctggctaaagaggccgaggctaaagacttcgtgaaccagagagtggacgagatcggcctggaaatccaggaggccaaaaccgaaacctgcaagtttaccagatctgccaagggactgagaacagacagacccctgcagtacctgggcttcatcttcgatggcgccaacatctacctgagaagcagcagcctcgccagataccaggacagagttaatcggggaatctgggtggccggcaagtgcatggacaaggtgaacgccaagaggatcagccggggccagctgcctagatctatgttcctgaagaagctgtacaagagatacagctacctgggaagaagaaacttcatcagctacggctacagagccgccaagatcatggactctccatctatccgcaagcagctgaagcctcactggcggagactgagggaaagaatctctgatgcccaaggcgagtgaagtctagagggcccgtttaaacccgctgatcagcctcgactgtgccttctagttgccagccatctgttgtttgcccctcccccgtgccttccttgaccctggaaggtgccactcccactgtcctttcctaataaaatgaggaaattgcatcgcattgtctgagtaggtgtcattctattctggggggtggggtggggcaggacagcaagggggaggattgggaagacaatagcaggcatgctggggatgcggtgggctctatggcttctgaggcggaaagaaccagctggggctctagggggtatccccacgcgccctgtagcggcgcattaagcgcggcgggtgtggtggttacgcgcagcgtgaccgctacacttgccagcgccctagcgcccgctcctttcgctttcttcccttcctttctcgccacgttcgccggctttccccgtcaagctctaaatcgggggctccctttagggttccgatttagtgctttacggcacctcgaccccaaaaaacttgattagggtgatggttcacgtagtgggccatcgccctgatagacggtttttcgccctttgacgttggagtccacgttctttaatagtggactcttgttccaaactggaacaacactcaaccctatctcggtctattcttttgatttataagggattttgccgatttcggcctattggttaaaaaatgagctgatttaacaaaaatttaacgcgaattaattctgtggaatgtgtgtcagttagggtgtggaaagtccccaggctccccagcaggcagaagtatgcaaagcatgcatctcaattagtcagcaaccaggtgtggaaagtccccaggctccccagcaggcagaagtatgcaaagcatgcatctcaattagtcagcaaccatagtcccgcccctaactccgcccatcccgcccctaactccgcccagttccgcccattctccgccccatggctgactaattttttttatttatgcagaggccgaggccgcctctgcctctgagctattccagaagtagtgaggaggcttttttggaggcctaggcttttgcaaaaagctcccgggagcttgtatatccattttcggatctgatcaagagacaggatgaggatcgtttcgcatgattgaacaagatggattgcacgcaggttctccggccgcttgggtggagaggctattcggctatgactgggcacaacagacaatcggctgctctgatgccgccgtgttccggctgtcagcgcaggggcgcccggttctttttgtcaagaccgacctgtccggtgccctgaatgaactgcaggacgaggcagcgcggctatcgtggctggccacgacgggcgttccttgcgcagctgtgctcgacgttgtcactgaagcgggaagggactggctgctattgggcgaagtgccggggcaggatctcctgtcatctcaccttgctcctgccgagaaagtatccatcatggctgatgcaatgcggcggctgcatacgcttgatccggctacctgcccattcgaccaccaagcgaaacatcgcatcgagcgagcacgtactcggatggaagccggtcttgtcgatcaggatgatctggacgaagagcatcaggggctcgcgccagccgaactgttcgccaggctcaaggcgcgcatgcccgacggcgaggatctcgtcgtgacccatggcgatgcctgcttgccgaatatcatggtggaaaatggccgcttttctggattcatcgactgtggccggctgggtgtggcggaccgctatcaggacatagcgttggctacccgtgatattgctgaagagcttggcggcgaatgggctgaccgcttcctcgtgctttacggtatcgccgctcccgattcgcagcgcatcgccttctatcgccttcttgacgagttcttctgagcgggactctggggttcgaaatgaccgaccaagcgacgcccaacctgccatcacgagatttcgattccaccgccgccttctatgaaaggttgggcttcggaatcgttttccgggacgccggctggatgatcctccagcgcggggatctcatgctggagttcttcgcccaccccaacttgtttattgcagcttataatggttacaaataaagcaatagcatcacaaatttcacaaataaagcatttttttcactgcattctagttgtggtttgtccaaactcatcaatgtatcttatcatgtctgtataccgtcgacctctagctagagcttggcgtaatcatggtcatagctgtttcctgtgtgaaattgttatccgctcacaattccacacaacatacgagccggaagcataaagtgtaaagcctggggtgcctaatgagtgagctaactcacattaattgcgttgcgctcactgcccgctttccagtcgggaaacctgtcgtgccagctgcattaatgaatcggccaacgcgcggggagaggcggtttgcgtattgggcgctcttccgcttcctcgctcactgactcgctgcgctcggtcgttcggctgcggcgagcggtatcagctcactcaaaggcggtaatacggttatccacagaatcaggggataacgcaggaaagaacatgtgagcaaaaggccagcaaaaggccaggaaccgtaaaaaggccgcgttgctggcgtttttccataggctccgcccccctgacgagcatcacaaaaatcgacgctcaagtcagaggtggcgaaacccgacaggactataaagataccaggcgtttccccctggaagctccctcgtgcgctctcctgttccgaccctgccgcttaccggatacctgtccgcctttctcccttcgggaagcgtggcgctttctcatagctcacgctgtaggtatctcagttcggtgtaggtcgttcgctccaagctgggctgtgtgcacgaaccccccgttcagcccgaccgctgcgccttatccggtaactatcgtcttgagtccaacccggtaagacacgacttatcgccactggcagcagccactggtaacaggattagcagagcgaggtatgtaggcggtgctacagagttcttgaagtggtggcctaactacggctacactagaagaacagtatttggtatctgcgctctgctgaagccagttaccttcggaaaaagagttggtagctcttgatccggcaaacaaaccaccgctggtagcggtttttttgtttgcaagcagcagattacgcgcagaaaaaaaggatctcaagaagatcctttgatcttttctacggggtctgacgctcagtggaacgaaaactcacgttaagggattttggtcatgagattatcaaaaaggatcttcacctagatccttttaaattaaaaatgaagttttaaatcaatctaaagtatatatgagtaaacttggtctgacagttaccaatgcttaatcagtgaggcacctatctcagcgatctgtctatttcgttcatccatagttgcctgactccccgtcgtgtagataactacgatacgggagggcttaccatctggccccagtgctgcaatgataccgcgagacccacgctcaccggctccagatttatcagcaataaaccagccagccggaagggccgagcgcagaagtggtcctgcaactttatccgcctccatccagtctattaattgttgccgggaagctagagtaagtagttcgccagttaatagtttgcgcaacgttgttgccattgctacaggcatcgtggtgtcacgctcgtcgtttggtatggcttcattcagctccggttcccaacgatcaaggcgagttacatgatcccccatgttgtgcaaaaaagcggttagctccttcggtcctccgatcgttgtcagaagtaagttggccgcagtgttatcactcatggttatggcagcactgcataattctcttactgtcatgccatccgtaagatgcttttctgtgactggtgagtactcaaccaagtcattctgagaatagtgtatgcggcgaccgagttgctcttgcccggcgtcaatacgggataataccgcgccacatagcagaactttaaaagtgctcatcattggaaaacgttcttcggggcgaaaactctcaaggatcttaccgctgttgagatccagttcgatgtaacccactcgtgcacccaactgatcttcagcatcttttactttcaccagcgtttctgggtgagcaaaaacaggaaggcaaaatgccgcaaaaaagggaataagggcgacacggaaatgttgaatactcatactcttcctttttcaatattattgaagcatttatcagggttattgtctcatgagcggatacatatttgaatgtatttagaaaaataaacaaataggggttccgcgcacatttccccgaaaagtgccacctgacgtcgacggatcgggagatctcccgatcccctatggtgcactctcagtacaatctgctctgatgccgcatagttaagccagtatctgctccctgcttgtgtgttggaggtcgctgagtagtgcgcgagcaaaatttaagctacaacaaggcaaggcttgaccgacaattgcatgaagaatctgcttagggttaggcgttttgcgctgcttcgcgatgtacgggccagatatacgcgtt

SEQ ID NO: 3468 - DNA, 4063 bp, synthetic construct
  source 1..4063: mol_type = other DNA
gagggcctatttcccatgattccttcatatttgcatatacgatacaaggctgttagagagataattagaattaatttgactgtaaacacaaagatattagtacaaaatacgtgacgtagaaagtaataatttcttgggtagtttgcagttttaaaattatgttttaaaatggactatcatatgcttaccgtaacttgaaagtatttcgatttcttggctttatatatcttgtggaaaggacgaaacaccgctcatcggatttgccggtgaggaaagtgacaggttgtcaagccacgcgaatccgctccatgagctgagacgcaacgcggacaacacgtagaacaggacttccgtcatacggacctctacgatgatactgccatgatactgcatttctaacatttagcggccaaagctcagttttcggactgagtgagataatgtgaagaacattgttgtatatccggggaggcggttattggaatgccgccaaccatcgcctctccggtttgctaggtatatcgtttttttaagcttgatgcatagcttgagtattctatagtgtcacctaaatagcttggcgtaatcatggtcatagctgtttcctgtgtgaaattgttatccgctcacaattccacacaacatacgagccggaagcataaagtgtaaagcctggggtgcctaatgagtgagctaactcacattaattgcgttgcgctcactgcccgctttccagtcgggaaacctgtcgtgccagctgcattaatgaatcggccaacgcgcggggagaggcggtttgcgtattgggcgctcttccgcttcctcgctcactgactcgctgcgctcggtcgttcggctgcggcgagcggtatcagctcactcaaaggcggtaatacggttatccacagaatcaggggataacgcaggaaagaacatgtgagcaaaaggccagcaaaaggccaggaaccgtaaaaaggccgcgttgctggcgtttttccataggctccgcccccctgacgagcatcacaaaaatcgacgctcaagtcagaggtggcgaaacccgacaggactataaagataccaggcgtttccccctggaagctccctcgtgcgctctcctgttccgaccctgccgcttaccggatacctgtccgcctttctcccttcgggaagcgtggcgctttctcatagctcacgctgtaggtatctcagttcggtgtaggtcgttcgctccaagctgggctgtgtgcacgaaccccccgttcagcccgaccgctgcgccttatccggtaactatcgtcttgagtccaacccggtaagacacgacttatcgccactggcagcagccactggtaacaggattagcagagcgaggtatgtaggcggtgctacagagttcttgaagtggtggcctaactacggctacactagaagaacagtatttggtatctgcgctctgctgaagccagttaccttcggaaaaagagttggtagctcttgatccggcaaacaaaccaccgctggtagcggtggtttttttgtttgcaagcagcagattacgcgcagaaaaaaaggatctcaagaagatcctttgatcttttctacggggtctgacgctcagtggaacgaaaactcacgttaagggattttggtcatgagattatcaaaaaggatcttcacctagatccttttaaattaaaaatgaagttttagcacgtgtcagtcctgctcctcggccacgaagtgcacgcagttgccggccgggtcgcgcagggcgaactcccgcccccacggctgctcgccgatctcggtcatggccggcccggaggcgtcccggaagttcgtggacacgacctccgaccactcggcgtacagctcgtccaggccgcgcacccacacccaggccagggtgttgtccggcaccacctggtcctggaccgcgctgatgaacagggtcacgtcgtcccggaccacaccggcgaagtcgtcctccacgaagtcccgggagaacccgagccggtcggtccagaactcgaccgctccggcgacgtcgcgcgcggtgagcaccggaacggcactggtcaacttggccatggtggccctcctcacgtgctattattgaagcatttatcagggttattgtctcatgagcggatacatatttgaatgtatttagaaaaataaacaaataggggttccgcgcacatttccccgaaaagtgccacctgatgcggtgtgaaataccgcacagatgcgtaaggagaaaataccgcatcaggaaattgtaagcgttaataattcagaagaactcgtcaagaaggcgatagaaggcgatgcgctgcgaatcgggagcggcgataccgtaaagcacgaggaagcggtcagcccattcgccgccaagctcttcagcaatatcacgggtagccaacgctatgtcctgatagcggtccgccacacccagccggccacagtcgatgaatccagaaaagcggccattttccaccatgatattcggcaagcaggcatcgccatgggtcacgacgagatcctcgccgtcgggcatgctcgccttgagcctggcgaacagttcggctggcgcgagcccctgatgctcttcgtccagatcatcctgatcgacaagaccggcttccatccgagtacgtgctcgctcgatgcgatgtttcgcttggtggtcgaatgggcaggtagccggatcaagcgtatgcagccgccgcattgcatcagccatgatggatactttctcggcaggagcaaggtgagatgacaggagatcctgccccggcacttcgcccaatagcagccagtcccttcccgcttcagtgacaacgtcgagcacagctgcgcaaggaacgcccgtcgtggccagccacgatagccgcgctgcctcgtcttgcagttcattcagggcaccggacaggtcggtcttgacaaaaagaaccgggcgcccctgcgctgacagccggaacacggcggcatcagagcagccgattgtctgttgtgcccagtcatagccgaatagcctctccacccaagcggccggagaacctgcgtgcaatccatcttgttcaatcatgcgaaacgatcctcatcctgtctcttgatcagagcttgatcccctgcgccatcagatccttggcggcaagaaagccatccagtttactttgcagggcttcccaaccttaccagagggcgccccagctggcaattccggttcgcttgctgtccataaaaccgcccagtctagctatcgccatgtaagcccactgcaagctacctgctttctctttgcgcttgcgttttcccttgtccagatagcccagtagctgacattcatccggggtcagcaccgtttctgcggactggctttctacgtgaaaaggatctaggtgaagatcctttttgataatctcatgcctgacatttatattccccagaacatcaggttaatggcgtttttgatgtcattttcgcggtggctgagatcagccacttcttccccgataacggagaccggcacactggccatatcggtggtcatcatgcgccagctttcatccccgatatgcaccaccgggtaaagttcacgggagactttatctgacagcagacgtgcactggccagggggatcaccatccgtcgccccggcgtgtcaataatatcactctgtacatccacaaacagacgataacggctctctcttttataggtgtaaaccttaaactgccgtacgtataggctgcgcaactgttgggaagggcgatcggtgcgggcctcttcgctattacgccagctggcgaaagggggatgtgctgcaaggcgattaagttgggtaacgccagggttttcccagtcacgacgttgtaaaacgacggccagtgaattgtaatacgactcactatagggcgaattgggccctctagatgcatgctcgagcggccgccagtgtgatggatatctgcagaattcgccctttgtacaaaaaagcaggctttaaaggaaccaattcagtcgactggatccggtaccaaggtcgggcaggaa

SEQ ID NO: 3469 - DNA, 4089 bp, synthetic construct
  source 1..4089: mol_type = other DNA
gagggcctatttcccatgattccttcatatttgcatatacgatacaaggctgttagagagataattagaattaatttgactgtaaacacaaagatattagtacaaaatacgtgacgtagaaagtaataatttcttgggtagtttgcagttttaaaattatgttttaaaatggactatcatatgcttaccgtaacttgaaagtatttcgatttcttggctttatatatcttgtggaaaggacgaaacaccgctttggatgtagatccaaaggtgcatcacaagctgtcaaggcccatcgcggcaccacaggtgaaataacccagggtgaccagcagtgcggccagcagcgctcggatacttattctcataggtactccaagtgtgacgctgacattatacgtcgatcctagcaatcgcggcgaaatcggaactgggtgactatgaccgattggatgatgtgaggagcattttggtttatccggccaggcggcttatgggattgccgccatcctaagcctggccggttggctaaaaacaaggatgtaatctttttttttaagcttgatgcatagcttgagtattctatagtgtcacctaaatagcttggcgtaatcatggtcatagctgtttcctgtgtgaaattgttatccgctcacaattccacacaacatacgagccggaagcataaagtgtaaagcctggggtgcctaatgagtgagctaactcacattaattgcgttgcgctcactgcccgctttccagtcgggaaacctgtcgtgccagctgcattaatgaatcggccaacgcgcggggagaggcggtttgcgtattgggcgctcttccgcttcctcgctcactgactcgctgcgctcggtcgttcggctgcggcgagcggtatcagctcactcaaaggcggtaatacggttatccacagaatcaggggataacgcaggaaagaacatgtgagcaaaaggccagcaaaaggccaggaaccgtaaaaaggccgcgttgctggcgtttttccataggctccgcccccctgacgagcatcacaaaaatcgacgctcaagtcagaggtggcgaaacccgacaggactataaagataccaggcgtttccccctggaagctccctcgtgcgctctcctgttccgaccctgccgcttaccggatacctgtccgcctttctcccttcgggaagcgtggcgctttctcatagctcacgctgtaggtatctcagttcggtgtaggtcgttcgctccaagctgggctgtgtgcacgaaccccccgttcagcccgaccgctgcgccttatccggtaactatcgtcttgagtccaacccggtaagacacgacttatcgccactggcagcagccactggtaacaggattagcagagcgaggtatgtaggcggtgctacagagttcttgaagtggtggcctaactacggctacactagaagaacagtatttggtatctgcgctctgctgaagccagttaccttcggaaaaagagttggtagctcttgatccggcaaacaaaccaccgctggtagcggtggtttttttgtttgcaagcagcagattacgcgcagaaaaaaaggatctcaagaagatcctttgatcttttctacggggtctgacgctcagtggaacgaaaactcacgttaagggattttggtcatgagattatcaaaaaggatcttcacctagatccttttaaattaaaaatgaagttttagcacgtgtcagtcctgctcctcggccacgaagtgcacgcagttgccggccgggtcgcgcagggcgaactcccgcccccacggctgctcgccgatctcggtcatggccggcccggaggcgtcccggaagttcgtggacacgacctccgaccactcggcgtacagctcgtccaggccgcgcacccacacccaggccagggtgttgtccggcaccacctggtcctggaccgcgctgatgaacagggtcacgtcgtcccggaccacaccggcgaagtcgtcctccacgaagtcccgggagaacccgagccggtcggtccagaactcgaccgctccggcgacgtcgcgcgcggtgagcaccggaacggcactggtcaacttggccatggtggccctcctcacgtgctattattgaagcatttatcagggttattgtctcatgagcggatacatatttgaatgtatttagaaaaataaacaaataggggttccgcgcacatttccccgaaaagtgccacctgatgcggtgtgaaataccgcacagatgcgtaaggagaaaataccgcatcaggaaattgtaagcgttaataattcagaagaactcgtcaagaaggcgatagaaggcgatgcgctgcgaatcgggagcggcgataccgtaaagcacgaggaagcggtcagcccattcgccgccaagctcttcagcaatatcacgggtagccaacgctatgtcctgatagcggtccgccacacccagccggccacagtcgatgaatccagaaaagcggccattttccaccatgatattcggcaagcaggcatcgccatgggtcacgacgagatcctcgccgtcgggcatgctcgccttgagcctggcgaacagttcggctggcgcgagcccctgatgctcttcgtccagatcatcctgatcgacaagaccggcttccatccgagtacgtgctcgctcgatgcgatgtttcgcttggtggtcgaatgggcaggtagccggatcaagcgtatgcagccgccgcattgcatcagccatgatggatactttctcggcaggagcaaggtgagatgacaggagatcctgccccggcacttcgcccaatagcagccagtcccttcccgcttcagtgacaacgtcgagcacagctgcgcaaggaacgcccgtcgtggccagccacgatagccgcgctgcctcgtcttgcagttcattcagggcaccggacaggtcggtcttgacaaaaagaaccgggcgcccctgcgctgacagccggaacacggcggcatcagagcagccgattgtctgttgtgcccagtcatagccgaatagcctctccacccaagcggccggagaacctgcgtgcaatccatcttgttcaatcatgcgaaacgatcctcatcctgtctcttgatcagagcttgatcccctgcgccatcagatccttggcggcaagaaagccatccagtttactttgcagggcttcccaaccttaccagagggcgccccagctggcaattccggttcgcttgctgtccataaaaccgcccagtctagctatcgccatgtaagcccactgcaagctacctgctttctctttgcgcttgcgttttcccttgtccagatagcccagtagctgacattcatccggggtcagcaccgtttctgcggactggctttctacgtgaaaaggatctaggtgaagatcctttttgataatctcatgcctgacatttatattccccagaacatcaggttaatggcgtttttgatgtcattttcgcggtggctgagatcagccacttcttccccgataacggagaccggcacactggccatatcggtggtcatcatgcgccagctttcatccccgatatgcaccaccgggtaaagttcacgggagactttatctgacagcagacgtgcactggccagggggatcaccatccgtcgccccggcgtgtcaataatatcactctgtacatccacaaacagacgataacggctctctcttttataggtgtaaaccttaaactgccgtacgtataggctgcgcaactgttgggaagggcgatcggtgcgggcctcttcgctattacgccagctggcgaaagggggatgtgctgcaaggcgattaagttgggtaacgccagggttttcccagtcacgacgttgtaaaacgacggccagtgaattgtaatacgactcactatagggcgaattgggccctctagatgcatgctcgagcggccgccagtgtgatggatatctgcagaattcgccctttgtacaaaaaagcaggctttaaaggaaccaattcagtcgactggatccggtaccaaggtcgggcaggaa